United States Patent Application Publication US 2004/0234960 A1 - sequence listing, part 13

SEQ ID NO: 40630 - DNA, 915 bp, Artificial Sequence
  chemically treated genomic DNA (Homo sapiens) CpG-island No: 40630
ctaaacgcacacacctctaccaaatacacacacccatatcaaacacacacacacgtcaaacacacacaccccgaatatacgtacccctaccgaacgctcacacacccatatcaaacacactcctatcaaacgcacacacccgtcgaacgcacacaccactatcgaacacacacacccatcgaacgcacacaccactatcgaacacacacccccgtcgaacgcacacaccactatcgaacacacacccccgtcgaacgcacacaccactatcgaacacacacccgacgaacgcacacaccactatcgaacacatacccccgtcgaatacacacaccactatcgaacacacaccactatcgaacacacaccactatcgaacacacacccgacgaacgcacacaccactatcgaacacacacacccatcgaacgcacacaccactattaaacacacacccaacgaacgcacacaccactatcgaacacacacccccgtcgaacgcacacaccactatcgaacacacaccactatcgaacacacacccgacgaacgcacacaccactatcgaacacacacacccatcgaacgcacacaccactatcgaacacacacacccgtcgaacgcacacaccaatcgaacacacacccccgtcgaacgcacacaccactatcgaacacacacccccgtcgaacgcacacaccactatcgaacacacacccccgtcgaacgcacacaccactatcgaacacacacccccgtcgaacgcacacccgacgaacgcacacaccactatcgaacacacacacccatcgaacgcacacaccactatcgaacacacacacccatcgaacgcacacaccgtcgaacacacacccgataaacgcacacaccactatcgaacatacacccatcga

SEQ ID NO: 40631 - DNA, 915 bp, Artificial Sequence
  chemically treated genomic DNA (Homo sapiens) CpG-island No: 40631
ttgggcgtatatatttttgttaggtgtatatatttatgttagatatatatatacgttaggtatatatatttcgagtgtacgtatttttgtcgggcgtttatatatttatgttagatatatttttgttaggcgtatatattcgtcgggcgtatatattattgtcgggtatatatatttatcgggcgtatatattattgtcgggtatatattttcgtcgggcgtatatattattgtcgggtatatattttcgtcgggcgtatatattattgtcgggtatatattcggcgggcgtatatattattgtcgggtatatattttcgtcgggtgtatatattattgtcgggtatatattattgtcgggtatatattattgtcgggtatatattcggcgggcgtatatattattgtcgggtatatatatttatcgggcgtatatattattgttgggtatatatttagcgggcgtatatattattgtcgggtatatattttcgtcgggcgtatatattattgtcgggtatatattattgtcgggtatatattcggcgggcgtatatattattgtcgggtatatatatttatcgggcgtatatattattgtcgggtatatatattcgtcgggcgtatatattagtcgggtatatattttcgtcgggcgtatatattattgtcgggtatatattttcgtcgggcgtatatattattgtcgggtatatattttcgtcgggcgtatatattattgtcgggtatatattttcgtcgggcgtatattcggcgggcgtatatattattgtcgggtatatatatttatcgggcgtatatattattgtcgggtatatatatttatcgggcgtatatatcgtcgggtatatattcggtgggcgtatatattattgtcgagtatatatttatcgg

SEQ ID NO: 40632 - DNA, 915 bp, Artificial Sequence
  chemically treated genomic DNA (Homo sapiens) CpG-island No: 40632
ccgataaatatatactcgacaataatatatacgcccaccgaatatatacccgacgatatatacgcccgataaatatatatacccgacaataatatatacgcccgataaatatatatacccgacaataatatatacgcccgccgaatatacgcccgacgaaaatatatacccgacaataatatatacgcccgacgaaaatatatacccgacaataatatatacgcccgacgaaaatatatacccgacaataatatatacgcccgacgaaaatatatacccgactaatatatacgcccgacgaatatatatacccgacaataatatatacgcccgataaatatatatacccgacaataatatatacgcccgccgaatatatacccgacaataatatatacccgacaataatatatacgcccgacgaaaatatatacccgacaataatatatacgcccgctaaatatatacccaacaataatatatacgcccgataaatatatatacccgacaataatatatacgcccgccgaatatatacccgacaataatatatacccgacaataatatatacccgacaataatatatacacccgacgaaaatatatacccgacaataatatatacgcccgccgaatatatacccgacaataatatatacgcccgacgaaaatatatacccgacaataatatatacgcccgacgaaaatatatacccgacaataatatatacgcccgataaatatatatacccgacaataatatatacgcccgacgaatatatacgcctaacaaaaatatatctaacataaatatataaacgcccgacaaaaatacgtacactcgaaatatatatacctaacgtatatatatatctaacataaatatatacacctaacaaaaatatatacgcccaa

SEQ ID NO: 40633 - DNA, 834 bp, Artificial Sequence
  chemically treated genomic DNA (Homo sapiens) CpG-island No: 40633
ttacgttttgtagtgtcgggttttgcggcgattattgagttttttcgttttcgtttttagttttttcgttttcgttttcggttttcgtttttttagtcggtcggggttcgtcgtttacgatttcgtacgtgtcgtcgacgtcgttttgtcgatttcgtcgtaggaggtggaattgtagtggtgtcggcggttttttttttggggcggcggtggcgaggcgttcgttggcggcgggtagcggttggatgaaatacgttttttttagtaggtagaaggcgtcgcgtacgttttcgtagaggttgagggcggtagtcgagttgggatcgttatttacggtgtcggagtagaagtagtgcgttaggtcggttttcggaagcggcgtttcggattcggatttgcgttttacgttttggagcgtgaagtcgggcgttaaaaagttgttgtcgggtcgtagttttagatttagttgttggttaaaggcgtgtaggcggaggcgcgtggtttcgtgtttcggggcgcgttttagtttcggtattattagtttttcgtttttttcggaggggcgttcgagtgcgttcgatacggttagtagcgtcgcggcgagtagtagtagcgtgggtattggtttaaagtttcgagatttcggagttcgtttcgcgttttttatgtcgttgtttagtttgcgtttttcgaatttttcgggtatagttcgttgtattggagttttaggagatatcgttcgtagtagcgtacggagcgagggatttttagttcgggtcgggagagtaaagtttcgttggtttgttttggattgttaaaattaataatttttat

SEQ ID NO: 40634 - DNA, 834 bp, Artificial Sequence
  chemically treated genomic DNA (Homo sapiens) CpG-island No: 40634
ataaaaattattaattttaacaatccaaaacaaaccaacgaaactttactctcccgacccgaactaaaaatccctcgctccgtacgctactacgaacgatatctcctaaaactccaatacaacgaactatacccgaaaaattcgaaaaacgcaaactaaacaacgacataaaaaacgcgaaacgaactccgaaatctcgaaactttaaaccaatacccacgctactactactcgccgcgacgctactaaccgtatcgaacgcactcgaacgcccctccgaaaaaaacgaaaaactaataataccgaaactaaaacgcgccccgaaacacgaaaccacgcgcctccgcctacacgcctttaaccaacaactaaatctaaaactacgacccgacaacaactttttaacgcccgacttcacgctccaaaacgtaaaacgcaaatccgaatccgaaacgccgcttccgaaaaccgacctaacgcactacttctactccgacaccgtaaataacgatcccaactcgactaccgccctcaacctctacgaaaacgtacgcgacgccttctacctactaaaaaaaacgtatttcatccaaccgctacccgccgccaacgaacgcctcgccaccgccgccccaaaaaaaaaaccgccgacaccactacaattccacctcctacgacgaaatcgacaaaacgacgtcgacgacacgtacgaaatcgtaaacgacgaaccccgaccgactaaaaaaacgaaaaccgaaaacgaaaacgaaaaaactaaaaacgaaaacgaaaaaactcaataatcgccgcaaaacccgacactacaaaacgtaa

SEQ ID NO: 40635 - DNA, 834 bp, Artificial Sequence
  chemically treated genomic DNA (Homo sapiens) CpG-island No: 40635
atagaaattgttaattttaataatttagagtaggttaacgaggttttgttttttcgattcgaattaaaggtttttcgtttcgtgcgttgttacgagcggtgttttttggggttttaatgtagcgagttgtgttcgaggggttcggaaggcgtaagttgggtagcgatatggggaacgcggagcgggtttcggggtttcggagttttgggttagtatttacgttgttgttgttcgtcgcggcgttattggtcgtgtcggacgtattcgggcgttttttcgaggaggacgaggagttagtggtgtcggagttggagcgcgtttcgggatacgggattacgcgttttcgtttgtacgtttttgattagtagttggatttggagttgcggttcgatagtagttttttggcgttcggttttacgttttagaacgtggggcgtaaattcgggttcgagacgtcgttttcggaaatcgatttggcgtattgtttttatttcggtatcgtgaatggcgattttagttcggttgtcgtttttagtttttgcgagggcgtgcgcggcgttttttatttgttgggggaggcgtattttatttagtcgttgttcgtcgttagcgagcgtttcgttatcgtcgttttaggggagaagtcgtcggtattattatagttttattttttgcggcggaatcggtagggcgacgtcggcggtacgtgcggggtcgtggacgacgagtttcggtcgattgggaaagcggagatcgaagacgaggacgaagggattgagggcgaggacgaaggggtttagtggtcgtcgtaggattcggtattgtaaggcgtag

SEQ ID NO: 40636 - DNA, 834 bp, Artificial Sequence
  chemically treated genomic DNA (Homo sapiens) CpG-island No: 40636
ctacgccttacaataccgaatcctacgacgaccactaaaccccttcgtcctcgccctcaatcccttcgtcctcgtcttcgatctccgctttcccaatcgaccgaaactcgtcgtccacgaccccgcacgtaccgccgacgtcgccctaccgattccgccgcaaaaaataaaactataataataccgacgacttctcccctaaaacgacgataacgaaacgctcgctaacgacgaacaacgactaaataaaatacgcctcccccaacaaataaaaaacgccgcgcacgccctcgcaaaaactaaaaacgacaaccgaactaaaatcgccattcacgataccgaaataaaaacaatacgccaaatcgatttccgaaaacgacgtctcgaacccgaatttacgccccacgttctaaaacgtaaaaccgaacgccaaaaaactactatcgaaccgcaactccaaatccaactactaatcaaaaacgtacaaacgaaaacgcgtaatcccgtatcccgaaacgcgctccaactccgacaccactaactcctcgtcctcctcgaaaaaacgcccgaatacgtccgacacgaccaataacgccgcgacgaacaacaacaacgtaaatactaacccaaaactccgaaaccccgaaacccgctccgcgttccccatatcgctacccaacttacgccttccgaacccctcgaacacaactcgctacattaaaaccccaaaaaacaccgctcgtaacaacgcacgaaacgaaaaacctttaattcgaatcgaaaaaacaaaacctcgttaacctactctaaattattaaaattaacaatttctat

SEQ ID NO: 40637 - DNA, 541 bp, Artificial Sequence
  chemically treated genomic DNA (Homo sapiens) CpG-island No: 40637
tcggtcgtgcgtaaggggttttaggcgtttagtatttttttagtatttcgggaggcgttttgttcggttggttttagcgttcgattttcgggcgtatttatttgtcgcgtcgcgttttttatattcgtttttattttcgggcggggtagggggtatcggcgggttttaggcgtttaggtttttttttttagttcggatttcgagtcgggattttggtatcggcgtcgtttatttgtcgcgttttaggcggcgtttttcgtttttcgtttttcgttttcgttttcgttttttgtttagttcgcgtttattcggttcggttcgttttggttttcgttttaattttaggaggcggtgttttagggtttagggcgatatttttaagcgggtcgcgggttattttgggcgggcgggggcgggggcggcgggaggaggcgttttttaagggaagttcgggacgggttttttgtttggtttaatttcggttgcggagggatttataagggattttggggcgtttttcgggttcggttatagcggttaa

SEQ ID NO: 40638 - DNA, 541 bp, Artificial Sequence
  chemically treated genomic DNA (Homo sapiens) CpG-island No: 40638
ttaaccgctataaccgaacccgaaaaacgccccaaaatcccttataaatccctccgcaaccgaaattaaaccaaacaaaaaacccgtcccgaacttcccttaaaaaacgcctcctcccgccgcccccgcccccgcccgcccaaaataacccgcgacccgcttaaaaatatcgccctaaaccctaaaacaccgcctcctaaaattaaaacgaaaaccaaaacgaaccgaaccgaataaacgcgaactaaacaaaaaacgaaaacgaaaacgaaaaacgaaaaacgaaaaacgccgcctaaaacgcgacaaataaacgacgccgataccaaaatcccgactcgaaatccgaactaaaaaaaaaaacctaaacgcctaaaacccgccgataccccctaccccgcccgaaaataaaaacgaatataaaaaacgcgacgcgacaaataaatacgcccgaaaatcgaacgctaaaaccaaccgaacaaaacgcctcccgaaatactaaaaaaatactaaacgcctaaaaccccttacgcacgaccga

SEQ ID NO: 40639 - DNA, 541 bp, Artificial Sequence
  chemically treated genomic DNA (Homo sapiens) CpG-island No: 40639
ttggtcgttgtggtcgggttcgggaagcgttttagagttttttatgggttttttcgtagtcggggttgagttaggtagggaattcgtttcggattttttttgggaaacgttttttttcgtcgttttcgttttcgttcgtttagggtgattcgcgattcgtttgggggtgtcgttttggattttgggatatcgttttttgagattaaagcgagagttagggcgggtcgggtcgagtaggcgcgagttaagtaggaggcggaggcggaggcggagggcgaggggcggggagcgtcgtttggagcgcggtaggtgagcggcgtcggtattagggtttcggttcggggttcgggttggggaggggaatttgggcgtttgggattcgtcgatgttttttgtttcgttcggaggtgaaagcgggtgtgaggagcgcggcgcggtaggtgagtgcgttcgagggtcgagcgttggggttagtcgggtagggcgtttttcggggtgttgggagagtgttgggcgtttgggattttttgcgtacggtcga

SEQ ID NO: 40640 - DNA, 541 bp, Artificial Sequence
  chemically treated genomic DNA (Homo sapiens) CpG-island No: 40640
tcgaccgtacgcaaaaaatcccaaacgcccaacactctcccaacaccccgaaaaacgccctacccgactaaccccaacgctcgaccctcgaacgcactcacctaccgcgccgcgctcctcacacccgctttcacctccgaacgaaacaaaaaacatcgacgaatcccaaacgcccaaattcccctccccaacccgaaccccgaaccgaaaccctaataccgacgccgctcacctaccgcgctccaaacgacgctccccgcccctcgccctccgcctccgcctccgcctcctacttaactcgcgcctactcgacccgacccgccctaactctcgctttaatctcaaaaaacgatatcccaaaatccaaaacgacacccccaaacgaatcgcgaatcaccctaaacgaacgaaaacgaaaacgacgaaaaaaaacgtttcccaaaaaaaatccgaaacgaattccctacctaactcaaccccgactacgaaaaaacccataaaaaactctaaaacgcttcccgaacccgaccacaacgaccaa

SEQ ID NO: 40641 - DNA, 920 bp, Artificial Sequence
  chemically treated genomic DNA (Homo sapiens) CpG-island No: 40641
gggataacgatattttttggggtttcggcgacgacgtcgttcggcggcgggggtcgcggggtcgcgggtcggggcggcgaagattttgcgtcgcgtttacgggcgagcgcggttcggtagtttcgcggtttcgcgttgggtttggtcgcgggcgggcggggggcgcgaggtaggggacgggggcgcggagttcggttaggagcgttcgcggcggcgggattcggcgggcgggcggcgcgtagggcgatttcggagcggtttcgggaaatttagtcgggttttgatttcgatcgttaacggtgttcgtagtcggcgaatgtaataaagaatagtcggtatggcggttggatcggggcggcgcgcggttgtcgggcgcggggggcggggggtagcgggtttagggcgcgtcggggttcgcgggggtagcgggtgcggttcggggtcggcggggcgtacgtcggggcgggcggcgggcgtagggttcggagttttatttgtttttggaatgtgtagagcgggatcggattcggatttcgggttgcgattcgtttcggaaattgcgtagtatcggaagtcggggggcggcggcggggtatggcgggatttgtagttcgcgggcgggcgcggggggcgtaggcgagattttggcgcggtcgggggttttgcgggtgggattgcggggcgcgggcggcgtggacggggtagcgggcgcgcgcggggcgggtttggtcggagggaatttcgcgcgcggttttttttttacgtggtacggttttgtcgtttacgcgcgcgggtagttttttttttattttttttcggacgcgttttttgcggagttggggagtggtggcggtgggtgggtcgagtttttttttagaataggtttgggatttgtttttatttacggtgatttttggatt

SEQ ID NO: 40642 - DNA, 920 bp, Artificial Sequence
  chemically treated genomic DNA (Homo sapiens) CpG-island No: 40642
aatccaaaaatcaccgtaaataaaaacaaatcccaaacctattctaaaaaaaaactcgacccacccaccgccaccactccccaactccgcaaaaaacgcgtccgaaaaaaaataaaaaaaaaactacccgcgcgcgtaaacgacaaaaccgtaccacgtaaaaaaaaaaccgcgcgcgaaattccctccgaccaaacccgccccgcgcgcgcccgctaccccgtccacgccgcccgcgccccgcaatcccacccgcaaaacccccgaccgcgccaaaatctcgcctacgccccccgcgcccgcccgcgaactacaaatcccgccataccccgccgccgccccccgacttccgatactacgcaatttccgaaacgaatcgcaacccgaaatccgaatccgatcccgctctacacattccaaaaacaaataaaactccgaaccctacgcccgccgcccgccccgacgtacgccccgccgaccccgaaccgcacccgctacccccgcgaaccccgacgcgccctaaacccgctaccccccgccccccgcgcccgacaaccgcgcgccgccccgatccaaccgccataccgactattctttattacattcgccgactacgaacaccgttaacgatcgaaatcaaaacccgactaaatttcccgaaaccgctccgaaatcgccctacgcgccgcccgcccgccgaatcccgccgccgcgaacgctcctaaccgaactccgcgcccccgtcccctacctcgcgccccccgcccgcccgcgaccaaacccaacgcgaaaccgcgaaactaccgaaccgcgctcgcccgtaaacgcgacgcaaaatcttcgccgccccgacccgcgaccccgcgacccccgccgccgaacgacgtcgtcgccgaaaccccaaaaaatatcgttatccc

SEQ ID NO: 40643 - DNA, 920 bp, Artificial Sequence
  chemically treated genomic DNA (Homo sapiens) CpG-island No: 40643
aatttagaggttatcgtgagtgggggtaagttttaggtttgttttagagaaaaattcgatttatttatcgttattattttttaatttcgtaagaaacgcgttcgaggagaggtggagagggagttgttcgcgcgcgtgggcggtagggtcgtgttacgtgggaggggggtcgcgcgcggaatttttttcggttagattcgtttcgcgcgcgttcgttgtttcgtttacgtcgttcgcgtttcgtagttttattcgtaggattttcggtcgcgttagggtttcgtttgcgtttttcgcgttcgttcgcggattataagtttcgttatgtttcgtcgtcgtttttcggttttcggtgttgcgtagttttcggagcggatcgtaattcggagttcggattcgatttcgttttgtatattttaaaggtaggtaaagtttcgggttttgcgttcgtcgttcgtttcggcgtgcgtttcgtcggtttcgggtcgtattcgttgttttcgcgagtttcggcgcgttttgggttcgttgtttttcgtttttcgcgttcggtagtcgcgcgtcgtttcggtttagtcgttatgtcgattgttttttgttatattcgtcggttgcgggtatcgttggcgatcggagttaaaattcggttggatttttcggagtcgtttcgggatcgttttgcgcgtcgttcgttcgtcgggtttcgtcgtcgcgggcgtttttggtcgggtttcgcgttttcgttttttgtttcgcgtttttcgttcgttcgcggttaggtttagcgcggggtcgcggggttgtcgggtcgcgttcgttcgtgggcgcggcgtagggttttcgtcgtttcggttcgcggtttcgcggttttcgtcgtcgggcggcgtcgtcgtcgaggttttaggggatgtcgttatttt

SEQ ID NO: 40644 - DNA, 920 bp, Artificial Sequence
  chemically treated genomic DNA (Homo sapiens) CpG-island No: 40644
aaaataacgacatcccctaaaacctcgacgacgacgccgcccgacgacgaaaaccgcgaaaccgcgaaccgaaacgacgaaaaccctacgccgcgcccacgaacgaacgcgacccgacaaccccgcgaccccgcgctaaacctaaccgcgaacgaacgaaaaacgcgaaacaaaaaacgaaaacgcgaaacccgaccaaaaacgcccgcgacgacgaaacccgacgaacgaacgacgcgcaaaacgatcccgaaacgactccgaaaaatccaaccgaattttaactccgatcgccaacgatacccgcaaccgacgaatataacaaaaaacaatcgacataacgactaaaccgaaacgacgcgcgactaccgaacgcgaaaaacgaaaaacaacgaacccaaaacgcgccgaaactcgcgaaaacaacgaatacgacccgaaaccgacgaaacgcacgccgaaacgaacgacgaacgcaaaacccgaaactttacctacctttaaaatatacaaaacgaaatcgaatccgaactccgaattacgatccgctccgaaaactacgcaacaccgaaaaccgaaaaacgacgacgaaacataacgaaacttataatccgcgaacgaacgcgaaaaacgcaaacgaaaccctaacgcgaccgaaaatcctacgaataaaactacgaaacgcgaacgacgtaaacgaaacaacgaacgcgcgcgaaacgaatctaaccgaaaaaaattccgcgcgcgacccccctcccacgtaacacgaccctaccgcccacgcgcgcgaacaactccctctccacctctcctcgaacgcgtttcttacgaaattaaaaaataataacgataaataaatcgaatttttctctaaaacaaacctaaaacttacccccactcacgataacctctaaatt

SEQ ID NO: 40645 - DNA, 967 bp, Artificial Sequence
  chemically treated genomic DNA (Homo sapiens) CpG-island No: 40645
cgcgtcggatttcgggcgcggtttttttttaggttttatcgttcgtcgttggggttggggtcgcgttttggttagcgtttattgcgttaggtataggtttatcgtggttagggtcgcgacgaagagcgatattagcgcgagttattgcgttttttcgagttacgagtttagtcgggttatggttatggcgtattttcggttcgtttcgttttaattttttcggtagtttcgggtcggaacggcggatttaggatacgcgttggttgcggttatagcgcgttgggggcgtggagggggcgcggcggggtcggagttcggcgaggagcgtggtcgggggtttttgggcgggtaagcggggaggaaacgcgcggcggtcgcggttcgggttgggcgtaagtttcgtatatttgcggaataggggcgcgagcggatttcgcggttcgcgttttcgattcggcgtttgggaagtttttgggtcgttgcgggtcgcgtttttttttgcgcgcgtcgtttcgggcgtttcgttcgcggtttagcggtggtcggaggaggttttggtcgcggggcggggcggggcgggggcggtgttcgagggagggggcgcggtcgggtttgcgggggtcgtagtttttttttttgtttttaacgcggcgtgttttcgtttttttaaaggttcggttttttcggtttcgttacgtgcgcgcgtcgttcgttttttcggcgtttgttcgcgggtcgcgaggtgattcgggttttcggatttattagtttaatttcggcggttgttgtgcggttgtttggtttggttcgtgtgcgcgtttgtataagtgcgtgtgtgtgtatatgtgtgagtgtgcgtgtgtatagcgcgtagttagggtgatttcgaggattgttatttgttcgttagcgagataggatttaggtttagttttcggaaagtttttggaaattcgtggttgttttt

SEQ ID NO: 40646 - DNA, 967 bp, Artificial Sequence
  chemically treated genomic DNA (Homo sapiens) CpG-island No: 40646
aaaaacaaccacgaatttccaaaaactttccgaaaactaaacctaaatcctatctcgctaacgaacaaataacaatcctcgaaatcaccctaactacgcgctatacacacgcacactcacacatatacacacacacgcacttatacaaacgcgcacacgaaccaaaccaaacaaccgcacaacaaccgccgaaattaaactaataaatccgaaaacccgaatcacctcgcgacccgcgaacaaacgccgaaaaaacgaacgacgcgcgcacgtaacgaaaccgaaaaaaccgaacctttaaaaaaacgaaaacacgccgcgttaaaaacaaaaaaaaaaactacgacccccgcaaacccgaccgcgccccctccctcgaacaccgcccccgccccgccccgccccgcgaccaaaacctcctccgaccaccgctaaaccgcgaacgaaacgcccgaaacgacgcgcgcaaaaaaaaacgcgacccgcaacgacccaaaaacttcccaaacgccgaatcgaaaacgcgaaccgcgaaatccgctcgcgcccctattccgcaaatatacgaaacttacgcccaacccgaaccgcgaccgccgcgcgtttcctccccgcttacccgcccaaaaacccccgaccacgctcctcgccgaactccgaccccgccgcgccccctccacgcccccaacgcgctataaccgcaaccaacgcgtatcctaaatccgccgttccgacccgaaactaccgaaaaaattaaaacgaaacgaaccgaaaatacgccataaccataacccgactaaactcgtaactcgaaaaaacgcaataactcgcgctaatatcgctcttcgtcgcgaccctaaccacgataaacctatacctaacgcaataaacgctaaccaaaacgcgaccccaaccccaacgacgaacgataaaacctaaaaaaaaaccgcgcccgaaatccgacgcg

SEQ ID NO: 40647 - DNA, 967 bp, Artificial Sequence
  chemically treated genomic DNA (Homo sapiens) CpG-island No: 40647
aggggtagttacggatttttagggatttttcgaggattgagtttggattttgtttcgttggcgagtaaatggtagttttcgaaattattttgattgcgcgttgtgtatacgtatatttatatatgtgtatatatacgtatttgtgtaagcgcgtatacgagttaagttaagtagtcgtatagtagtcgtcggggttgggttgatgaattcggaggttcgggttatttcgcggttcgcgggtaggcgtcggaggggcgggcgacgcgcgtacgtggcggggtcgggaaggtcgggtttttaggggggcgggggtacgtcgcgttgggagtaggggggaggattgcggttttcgtaggttcggtcgcgttttttttttcgggtatcgttttcgtttcgtttcgtttcgcggttagagtttttttcggttatcgttgggtcgcgggcgggacgttcggggcggcgcgcgtaggaggaagcgcggttcgtagcggtttaggaattttttagacgtcgagtcgggagcgcgggtcgcggggttcgttcgcgtttttgtttcgtaggtgtgcggggtttgcgtttagttcgggtcgcggtcgtcgcgcgtttttttttcgtttgttcgtttagaggttttcggttacgtttttcgtcgggtttcgatttcgtcgcgttttttttacgtttttagcgcgttgtggtcgtagttagcgcgtgttttgagttcgtcgtttcggttcggggttgtcggggaagttggggcgaggcgggtcggggatgcgttatggttatggttcggttgggttcgtggttcggggaggcgtagtggttcgcgttggtgtcgtttttcgtcgcggttttggttacggtaggtttgtatttggcgtagtgggcgttggttagggcgcgattttagttttagcggcgggcggtggagtttggagaggggtcgcgttcggggttcgacgcg

SEQ ID NO: 40648 - DNA, 967 bp, Artificial Sequence
  chemically treated genomic DNA (Homo sapiens) CpG-island No: 40648
cgcgtcgaaccccgaacgcgacccctctccaaactccaccgcccgccgctaaaactaaaatcgcgccctaaccaacgcccactacgccaaatacaaacctaccgtaaccaaaaccgcgacgaaaaacgacaccaacgcgaaccactacgcctccccgaaccacgaacccaaccgaaccataaccataacgcatccccgacccgcctcgccccaacttccccgacaaccccgaaccgaaacgacgaactcaaaacacgcgctaactacgaccacaacgcgctaaaaacgtaaaaaaaacgcgacgaaatcgaaacccgacgaaaaacgtaaccgaaaacctctaaacgaacaaacgaaaaaaaaacgcgcgacgaccgcgacccgaactaaacgcaaaccccgcacacctacgaaacaaaaacgcgaacgaaccccgcgacccgcgctcccgactcgacgtctaaaaaattcctaaaccgctacgaaccgcgcttcctcctacgcgcgccgccccgaacgtcccgcccgcgacccaacgataaccgaaaaaaactctaaccgcgaaacgaaacgaaacgaaaacgatacccgaaaaaaaaaacgcgaccgaacctacgaaaaccgcaatcctcccccctactcccaacgcgacgtacccccgcccccctaaaaacccgaccttcccgaccccgccacgtacgcgcgtcgcccgcccctccgacgcctacccgcgaaccgcgaaataacccgaacctccgaattcatcaacccaaccccgacgactactatacgactacttaacttaactcgtatacgcgcttacacaaatacgtatatatacacatatataaatatacgtatacacaacgcgcaatcaaaataatttcgaaaactaccatttactcgccaacgaaacaaaatccaaactcaatcctcgaaaaatccctaaaaatccgtaactacccct

SEQ ID NO: 40649 - DNA, 2143 bp, Artificial Sequence
  chemically treated genomic DNA (Homo sapiens) CpG-island No: 40649
gttcggtgttagggttgtgagcgtttgtacgaaaggaaaaattttaggtcgtgtgaagtttaatttttttcgttttttcggttaggtaattttatcggggtatttgtttaaaaatatttcgttttcgaacgcgcgtttttgcggaattttttcgaatcgtagagttttcgtggttgggatcgtatagtaatcgggggtagagtgcgagtttttagcggtgtgttgggatggaaaagtaggagtcgttgaggatggattacggggcgtgttttcgaaaagtcgggaagagatgtggcggggttgtcgcgggcgtttttaaggtcggtacgggtggcgttttgattttttgtttttttagtcgcggatttcggacggggggaagggggtttttttaagcggggagacggtcgtcggtcgagtagtagggtttttggtcggcggagggtgttatgttttgcgggatcgtcgggaagttttagataaggtttgcgggggttttggaggaaaaaaaacgcgttgtgaggtttaggcgttcgcgggaggggtcgggggcggggagggagcgtttagcgggtatcgagcggttacgtttcggttatcgggtcgaggacggggcggcggggttaggtttcggatcgtgaagggagcggcgggtcgcggtaggtgcggggtttttaaggtcgtcggttagttttcgcgtatatttcgcggttcgggtcgtcggtttttaatttttgttcggaataggagaacgcgtttttttttacgaggcgttttaatcgtttcgcgcgaggggcgcgcgtttgggttaggcgtgttttttattttaggggtagttcggttagggtgaagagtgaagttcgtgagggaatggagtatgcgtattcgcgagggcgaggttaagtgttggtagggagcgtgcgtagtgtgaaggtataatcggttacgtgggaattcgggatatgttcggtgagcgtttaggtttcgcgtacgcgtagaagcgttcggagttcgtaattcgttggtggagaaaaaagaggagagaaattattttagagttacgttaggaaaggtcgcgttttgcggggaggttgtagttttttaaggagtttcgtagtttttttagagttaggggcgtgatagttatttatcggtttttagtttcgaggtagacgtcgggttttttttcgtttatattcggttcgcgcgcgtcgtagtcgtcgttgtcgttgtgattttatttattttgaatttgacgttattttatattagggatgaggttatcgtaggtatcgttcgttacgtgcgcggtattttgattgggcgtcgggcgtcggagggcggggcggggggggggtttcgcggcgtagggggacgggggagggcgggtttgttcggagtcgcgcgtcgaacggacgttgtcgcgttgtaagttcgcgttttcggtttatgaggggagtttgcggcggtcgttaggggaggcggtcgggttgggggttacggcgaggaggttgagcgtttcggtcgggtggagttcgtcgcggcgaggagcgcgtcgatttttaggggattttgtcgtttgtcggaggcgtttttgttgcggggtcgtttcgggttattcggtcgcggttttgtttagttgggtcgttagtagttttcgttttcggcgcggcgggatgcgtggcgcgagcgtttagtttttcggaggggaggacgcgttttcgtttatcggtggacggcgggcgatttttcgagtcgacgatttcgatagcgacgggagcgacgcgcggttttttgacgggcgcgggcggcgagcggggttttgcggttttcgggtcggcggtagacgttttcggttcgcgaggaaagttcgcgggaggcggtttttgtcgttcgttagtcgtttagagcgtttttatttttttttttcgacgtaatttggttatttggtttttgggcggggattcggcggtcgcggttagggcgttcgggttcgttcgtcgcgtagatgggggtcggttttgattttcgtcggggcgtttatagcggttcgtaggtagtcggagatttcgtatagtgttcggtttatcggagggttgtgattttttttttttttgtagaaatattataattttattgatga

SEQ ID NO: 40650 - DNA, 2143 bp, Artificial Sequence
  chemically treated genomic DNA (Homo sapiens) CpG-island No: 40650
tcatcaataaaattataatatttctacaaaaaaaaaaaaaatcacaaccctccgataaaccgaacactatacgaaatctccgactacctacgaaccgctataaacgccccgacgaaaatcaaaaccgacccccatctacgcgacgaacgaacccgaacgccctaaccgcgaccgccgaatccccgcccaaaaaccaaataaccaaattacgtcgaaaaaaaaaaataaaaacgctctaaacgactaacgaacgacaaaaaccgcctcccgcgaactttcctcgcgaaccgaaaacgtctaccgccgacccgaaaaccgcaaaaccccgctcgccgcccgcgcccgtcaaaaaaccgcgcgtcgctcccgtcgctatcgaaatcgtcgactcgaaaaatcgcccgccgtccaccgataaacgaaaacgcgtcctcccctccgaaaaactaaacgctcgcgccacgcatcccgccgcgccgaaaacgaaaactactaacgacccaactaaacaaaaccgcgaccgaataacccgaaacgaccccgcaacaaaaacgcctccgacaaacgacaaaatcccctaaaaatcgacgcgctcctcgccgcgacgaactccacccgaccgaaacgctcaacctcctcgccgtaacccccaacccgaccgcctcccctaacgaccgccgcaaactcccctcataaaccgaaaacgcgaacttacaacgcgacaacgtccgttcgacgcgcgactccgaacaaacccgccctcccccgtccccctacgccgcgaaaccccccccccgccccgccctccgacgcccgacgcccaatcaaaataccgcgcacgtaacgaacgatacctacgataacctcatccctaatataaaataacgtcaaattcaaaataaataaaatcacaacgacaacgacgactacgacgcgcgcgaaccgaatataaacgaaaaaaaacccgacgtctacctcgaaactaaaaaccgataaataactatcacgcccctaactctaaaaaaactacgaaactccttaaaaaactacaacctccccgcaaaacgcgacctttcctaacgtaactctaaaataatttctctcctcttttttctccaccaacgaattacgaactccgaacgcttctacgcgtacgcgaaacctaaacgctcaccgaacatatcccgaattcccacgtaaccgattataccttcacactacgcacgctccctaccaacacttaacctcgccctcgcgaatacgcatactccattccctcacgaacttcactcttcaccctaaccgaactacccctaaaataaaaaacacgcctaacccaaacgcgcgcccctcgcgcgaaacgattaaaacgcctcgtaaaaaaaaacgcgttctcctattccgaacaaaaattaaaaaccgacgacccgaaccgcgaaatatacgcgaaaactaaccgacgaccttaaaaaccccgcacctaccgcgacccgccgctcccttcacgatccgaaacctaaccccgccgccccgtcctcgacccgataaccgaaacgtaaccgctcgatacccgctaaacgctccctccccgcccccgacccctcccgcgaacgcctaaacctcacaacgcgttttttttcctccaaaacccccgcaaaccttatctaaaacttcccgacgatcccgcaaaacataacaccctccgccgaccaaaaaccctactactcgaccgacgaccgtctccccgcttaaaaaaacccccttccccccgtccgaaatccgcgactaaaaaaacaaaaaatcaaaacgccacccgtaccgaccttaaaaacgcccgcgacaaccccgccacatctcttcccgacttttcgaaaacacgccccgtaatccatcctcaacgactcctacttttccatcccaacacaccgctaaaaactcgcactctacccccgattactatacgatcccaaccacgaaaactctacgattcgaaaaaattccgcaaaaacgcgcgttcgaaaacgaaatatttttaaacaaataccccgataaaattacctaaccgaaaaaacgaaaaaaattaaacttcacacgacctaaaatttttcctttcgtacaaacgctcacaaccctaacaccgaac

SEQ ID NO: 40651 - DNA, 2143 bp, Artificial Sequence
  chemically treated genomic DNA (Homo sapiens) CpG-island No: 40651
ttattagtggagttgtaatatttttgtaaaaaaaaaaaagattatagtttttcgatgagtcgggtattatgcgaagttttcggttgtttgcgggtcgttgtggacgtttcggcgggggttaggatcgatttttatttgcgcggcgaacgagttcggacgttttggtcgcggtcgtcgggttttcgtttaggggttaggtggttaggttgcgtcgggaggaggaaatggaagcgttttgagcgattagcgagcggtaggagtcgtttttcgcgggtttttttcgcgggtcgggagcgtttgtcgtcgattcgaggatcgtagggtttcgttcgtcgttcgcgttcgttagaaagtcgcgcgtcgttttcgtcgttgtcggggtcgtcggttcggggagtcgttcgtcgtttatcggtgaacgggagcgcgttttttttttcgagggattaagcgttcgcgttacgtatttcgtcgcgtcggaagcggggattattggcggtttagttgggtaggatcgcggtcgaatgattcggggcgatttcgtagtaagggcgttttcggtaggcggtaaagttttttgagaatcggcgcgtttttcgtcgcgacggattttattcggtcggggcgtttagttttttcgtcgtggtttttagttcggtcgttttttttaacggtcgtcgtaggttttttttatggatcgagagcgcgggtttgtagcgcggtagcgttcgttcggcgcgcggtttcgggtaggttcgttttttttcgtttttttgcgtcgcgaggtttttttttcgtttcgtttttcggcgttcggcgtttaattagagtgtcgcgtacgtgacgagcgatgtttgcgatgattttatttttggtgtgggatgacgttaaatttaagatggatggaattatagcggtagcggcggttgcggcgcgcgcgagtcgagtgtgagcggaaaggggttcggcgtttgtttcgagattgaagatcggtgagtaattgttacgtttttagttttaggagaattgcggggttttttgggaggttatagttttttcgtaaaacgcggttttttttgacgtaattttgaggtgatttttttttttttttttttttattagcgggttgcgggtttcgagcgtttttgcgcgtgcgcgggatttgggcgtttatcgagtatgtttcgggtttttacgtagtcgattgtatttttatattgcgtacgttttttgttagtatttggtttcgttttcgcgaatgcgtatgttttatttttttacgggttttattttttattttggtcgagttgtttttggggtaggggatacgtttggtttaggcgcgcgtttttcgcgcggagcggttgaaacgtttcgtggagaagggcgcgtttttttgtttcgggtaggggttgggggtcggcggttcgggtcgcggggtgtgcgcggaagttggtcggcggttttggggatttcgtatttgtcgcgattcgtcgttttttttacggttcgggatttagtttcgtcgtttcgttttcggttcggtggtcggagcgtgatcgttcggtgttcgttggacgtttttttttcgttttcggtttttttcgcggacgtttggattttatagcgcgtttttttttttttagagttttcgtagattttgtttgggatttttcggcggtttcgtagagtatagtatttttcgtcggttaggagttttgttgttcggtcggcgatcgttttttcgtttggaggagttttttttttttcgttcgaggttcgcggttggaggggtagggagttaagacgttattcgtgtcggttttagagacgttcgcggtagtttcgttatattttttttcggtttttcgggaatacgtttcgtagtttatttttagcggtttttgtttttttattttagtatatcgttgggggttcgtattttgttttcggttgttatgcggttttagttacgagggttttgcggttcgggagaatttcgtaagagcgcgcgttcggaggcggggtgtttttagataggtgtttcggtgggattgtttgatcgagaggacggggaaagttagattttatacggtttggggttttttttttcgtgtaagcgtttatagttttggtatcgagt

SEQ ID NO: 40652 - DNA, 2143 bp, Artificial Sequence
  chemically treated genomic DNA (Homo sapiens) CpG-island No: 40652
actcgataccaaaactataaacgcttacacgaaaaaaaaaaccccaaaccgtataaaatctaactttccccgtcctctcgatcaaacaatcccaccgaaacacctatctaaaaacaccccgcctccgaacgcgcgctcttacgaaattctcccgaaccgcaaaaccctcgtaactaaaaccgcataacaaccgaaaacaaaatacgaacccccaacgatatactaaaataaaaaaacaaaaaccgctaaaaataaactacgaaacgtattcccgaaaaaccgaaaaaaaatataacgaaactaccgcgaacgtctctaaaaccgacacgaataacgtcttaactccctacccctccaaccgcgaacctcgaacgaaaaaaaaaaaactcctccaaacgaaaaaacgatcgccgaccgaacaacaaaactcctaaccgacgaaaaatactatactctacgaaaccgccgaaaaatcccaaacaaaatctacgaaaactctaaaaaaaaaaaaacgcgctataaaatccaaacgtccgcgaaaaaaaccgaaaacgaaaaaaaaacgtccaacgaacaccgaacgatcacgctccgaccaccgaaccgaaaacgaaacgacgaaactaaatcccgaaccgtaaaaaaaacgacgaatcgcgacaaatacgaaatccccaaaaccgccgaccaacttccgcgcacaccccgcgacccgaaccgccgacccccaacccctacccgaaacaaaaaaacgcgcccttctccacgaaacgtttcaaccgctccgcgcgaaaaacgcgcgcctaaaccaaacgtatcccctaccccaaaaacaactcgaccaaaataaaaaataaaacccgtaaaaaaataaaacatacgcattcgcgaaaacgaaaccaaatactaacaaaaaacgtacgcaatataaaaatacaatcgactacgtaaaaacccgaaacatactcgataaacgcccaaatcccgcgcacgcgcaaaaacgctcgaaacccgcaacccgctaataaaaaaaaaaaaaaaaaaaaatcacctcaaaattacgtcaaaaaaaaccgcgttttacgaaaaaactataacctcccaaaaaaccccgcaattctcctaaaactaaaaacgtaacaattactcaccgatcttcaatctcgaaacaaacgccgaacccctttccgctcacactcgactcgcgcgcgccgcaaccgccgctaccgctataattccatccatcttaaatttaacgtcatcccacaccaaaaataaaatcatcgcaaacatcgctcgtcacgtacgcgacactctaattaaacgccgaacgccgaaaaacgaaacgaaaaaaaaacctcgcgacgcaaaaaaacgaaaaaaaacgaacctacccgaaaccgcgcgccgaacgaacgctaccgcgctacaaacccgcgctctcgatccataaaaaaaacctacgacgaccgttaaaaaaaacgaccgaactaaaaaccacgacgaaaaaactaaacgccccgaccgaataaaatccgtcgcgacgaaaaacgcgccgattctcaaaaaactttaccgcctaccgaaaacgcccttactacgaaatcgccccgaatcattcgaccgcgatcctacccaactaaaccgccaataatccccgcttccgacgcgacgaaatacgtaacgcgaacgcttaatccctcgaaaaaaaaaacgcgctcccgttcaccgataaacgacgaacgactccccgaaccgacgaccccgacaacgacgaaaacgacgcgcgactttctaacgaacgcgaacgacgaacgaaaccctacgatcctcgaatcgacgacaaacgctcccgacccgcgaaaaaaacccgcgaaaaacgactcctaccgctcgctaatcgctcaaaacgcttccatttcctcctcccgacgcaacctaaccacctaacccctaaacgaaaacccgacgaccgcgaccaaaacgtccgaactcgttcgccgcgcaaataaaaatcgatcctaacccccgccgaaacgtccacaacgacccgcaaacaaccgaaaacttcgcataatacccgactcatcgaaaaactataatcttttttttttttacaaaaatattacaactccactaataa

SEQ ID NO: 40653 - DNA, 774 bp, Artificial Sequence
  chemically treated genomic DNA (Homo sapiens) CpG-island No: 40653
cgcgttagcgaaagttcgtgcgttttcggagtcggggaaggcgcgggttatgattcgggttcgttcgtaaaggtcgggtagtgtcgtaaggcgtgggggcgttttcgttcggtggtttcggggttggtgcgattttgggtacgtcggggtcggggtcggagtcgggggtcgcggcggtcggggagggggaggagtcgcgcggtttcgtcggcgtttcgcgggttagggaaagtgaaagggcggcggggtttttcgcgcgtcgttttaggaagtcgcgagtaggaagcgttcgcggcggtcgggtcgggttgggttgcggagcgcgggtttcggcggcgtaggtgaggcgcggggtcggggtcggatcgggaggcggggatttttcgttttttcgttcgtatttgcggggtagtcggcgtttaggcgtcgtagtcgtttagtatttgcggcgtttttagggagtcgggcgcggggttttgcgtattcggagttcggttttttttttttttttttttttttttcggggggaggtgggggttggtttggatgtttttcgagagtcggggacggttttaagttattttcgcggagggaagtttttgaaatacgatatttagaagagtggttttcggcgataatgtcgggcgttttcggatcggggtaacgttgggatttcggggaagtggaggtagagggagcgggtacggggtcggtagtcgttttacggagttttcggtaggggcgagtttagttgtttagtcgggttttttgttt

SEQ ID NO: 40654 - DNA, 774 bp, Artificial Sequence
  chemically treated genomic DNA (Homo sapiens) CpG-island No: 40654
aaacaaaaaacccgactaaacaactaaactcgcccctaccgaaaactccgtaaaacgactaccgaccccgtacccgctccctctacctccacttccccgaaatcccaacgttaccccgatccgaaaacgcccgacattatcgccgaaaaccactcttctaaatatcgtatttcaaaaacttccctccgcgaaaataacttaaaaccgtccccgactctcgaaaaacatccaaaccaacccccacctccccccgaaaaaaaaaaaaaaaaaaaaaaaaaaccgaactccgaatacgcaaaaccccgcgcccgactccctaaaaacgccgcaaatactaaacgactacgacgcctaaacgccgactaccccgcaaatacgaacgaaaaaacgaaaaatccccgcctcccgatccgaccccgaccccgcgcctcacctacgccgccgaaacccgcgctccgcaacccaacccgacccgaccgccgcgaacgcttcctactcgcgacttcctaaaacgacgcgcgaaaaaccccgccgccctttcactttccctaacccgcgaaacgccgacgaaaccgcgcgactcctccccctccccgaccgccgcgacccccgactccgaccccgaccccgacgtacccaaaatcgcaccaaccccgaaaccaccgaacgaaaacgcccccacgccttacgacactacccgacctttacgaacgaacccgaatcataacccgcgccttccccgactccgaaaacgcacgaactttcgctaacgcg

SEQ ID NO: 40655 - DNA, 774 bp, Artificial Sequence
  chemically treated genomic DNA (Homo sapiens) CpG-island No: 40655
gggtaggggattcggttggatagttaagttcgtttttgtcggggatttcgtggagcggttgtcggtttcgtgttcgttttttttgtttttattttttcggaattttagcgttgtttcggttcgggaacgttcggtattgtcgtcgagggttatttttttagatgtcgtattttaaagattttttttcgcgaaaatagtttgagatcgttttcggttttcggaaaatatttaaattagtttttattttttttcgaaaaaaaagaaaaggaaggagaggagtcgagtttcgagtgcgtagggtttcgcgttcggttttttgagggcgtcgtaggtgttgagcggttgcggcgtttgagcgtcggttgtttcgtaggtgcgggcgggggggcggggggttttcgtttttcggttcggtttcggtttcgcgttttatttgcgtcgtcgaggttcgcgtttcgtagtttagttcggttcggtcgtcgcgggcgttttttgttcgcgattttttggagcggcgcgcgggaggtttcgtcgtttttttattttttttggttcgcggggcgtcggcggagtcgcgcggttttttttttttttcggtcgtcgcgattttcggtttcggtttcggtttcggcgtgtttagggtcgtattagtttcggggttatcgggcgggggcgtttttacgttttgcggtattgttcggtttttgcgggcgaattcgggttatggttcgcgtttttttcggtttcgagggcgtacgggttttcgttggcgcg

SEQ ID NO: 40656 - DNA, 774 bp, Artificial Sequence
  chemically treated genomic DNA (Homo sapiens) CpG-island No: 40656
cgcgccaacgaaaacccgtacgccctcgaaaccgaaaaaaacgcgaaccataacccgaattcgcccgcaaaaaccgaacaataccgcaaaacgtaaaaacgcccccgcccgataaccccgaaactaatacgaccctaaacacgccgaaaccgaaaccgaaaccgaaaatcgcgacgaccgaaaaaaaaaaaaaaccgcgcgactccgccgacgccccgcgaaccaaaaaaaataaaaaaacgacgaaacctcccgcgcgccgctccaaaaaatcgcgaacaaaaaacgcccgcgacgaccgaaccgaactaaactacgaaacgcgaacctcgacgacgcaaataaaacgcgaaaccgaaaccgaaccgaaaaacgaaaaccccccgcccccccgcccgcacctacgaaacaaccgacgctcaaacgccgcaaccgctcaacacctacgacgccctcaaaaaaccgaacgcgaaaccctacgcactcgaaactcgactcctctccttccttttcttttttttcgaaaaaaaataaaaactaatttaaatattttccgaaaaccgaaaacgatctcaaactattttcgcgaaaaaaaatctttaaaatacgacatctaaaaaaataaccctcgacgacaataccgaacgttcccgaaccgaaacaacgctaaaattccgaaaaaataaaaacaaaaaaaacgaacacgaaaccgacaaccgctccacgaaatccccgacaaaaacgaacttaactatccaaccgaatcccctaccc

SEQ ID NO: 40657 - DNA, 3037 bp, Artificial Sequence
  chemically treated genomic DNA (Homo sapiens) CpG-island No: 40657
gagaagcgagtattaatattaagtttgtcgcgttatttatatttacgtatgcgtttttttttatttgtatcgagtttttcgtttcgtttatatttacgtaggcgtttttttttatttgtatcgagtttttattttcgtttatatttacgtaggcgtttttttttatttgtatcgagtttttcgtttcgtttatatttacgtaggcgtttttttttatttgtatcgagtttttcgtttcgtttatatttacgtaggcgtttttttttatttgtatcgagtttttcgtttcgtttatatttacgtaggcgtttttttttatttgtatcgagtttttcgtttcgtttatatttacgtaggcgtttttttttatttgtatcgagtttttcgtttcgtttatatttacgtaggcgtttttttttatttatatcgagtttttcgtttcgtttatatttacgtaggcgtttttttttatttgtatcgagtttttcgtttcgtttatatttacgtaggcgtttttttttatttgtatcgagtttttcgtttcgtttatatttacgtaggcgtttttttttatttgtatcgagtttgtcgtttcgtttatatttacgtaggcgtttttttttatttgtatcgagtttgtcgtttcgtttatatttacgtaggcgtttttttttatttgtatcgagtttttcgtttcgtttatatttacgtaggcgtttttttttatttgtatcgagtttttattttcgtttatatttacgtaggcgtttttttttatttgtatcgagtttttcgtttcgtttatatttacgtaggcgtttttttttatttgtatcgagtttgtcgtttcgtttatatttacgtaggcgtttttttttatttgtatcgagtttttcgtttcgtttatatttacgtaggcgtttttttttatttgtatcgagtttttattttcgtttatatttacgtaggcgtttttttttatttgtatcgagtttttcgtttcgtttatatttacgtaggcgtttttttttatttgtatcgagtttttattttcgtttatatttacgtaggcgtttttttttatttgtatcgagtttttattttcgtttatatttatgtaggcgtttttttttatttgtatcgagtttttcgtttcgtttatatttacgtaggcgtttttttttatttgtatcgagtttttcgtttcgtttatatttacgtaggcgtttttttttatttgtatcgagtttttcgttcggtttatatttacgtaggcgtttttttttatttgtatcgagtttttcgtttcgtttatatttacgtaggcgtttttttttatttgtatcgagtttttcgtttcgtttatatttacgtaggcgtttttttttatttgtatcgagtttttcgtttcgtttatatttacgtaggcgtttttttttatttgtatcgagtttttattttcgtttatatttacgtaggcgtttttttttatttgtatcgagtttgtcgtttcgtttatatttacgtaggcgttgttttttatttgtatcgagtttgtcgtttcgtttatatttacgtaggcgtttttttttatttgtatcgagtttttattttcgtttatatttacgtaggcgtttttttttatttgtatcgagtttttattttcgtttatatttacgtaggcgtttttttttatttgtatcgagtttttcgtttcgtttatatttacgtaggcgtttttttttatttgtatcgagtttttattttcgtttatatttacgtaggcgtttttttttatttgtatcgagtttttcgtttcgtttatatttacgtaggcgtttttttttatttgtatcgagtttttattttcgtttatatttacgtaggcgtttttttttatttgtatcgggtttgtcgtttcgtttatatttacgtaggcgtttttttttatttgtatcgagtttttattttcgtttatatttacgtaggcgtttttttttatttgtatcgagtttttattttcgtttatatttacgtaggcgtttttttttatttgtatcgagtttttcgtttcgtttatatttacgtaggcgtttttttttatttgtatcgagtttttattttcgtttatatttacgtaggcgtttttttttatttgtatcgagtttttcgtttcgtttatatttacgtaggcgtttttttttatttgtatcgagtttttattttcgtttatatttacgtaggcgtttttttttatttgtatcgagtttttcgtttcgtttatatttacgtaggcgtttttttttatttgtatcgagtttttattttcgtttatatttacgtaggcgtttttttttatttgtatcgagtttttattttcgtttatatttacgtaggcgtttttttttatttgtatcgagtttttattttcgtttatatttacgtaggcgtttttttttatttgtatcgagtttttcgtttcgtttatatttacgtaggcgtttttttttatttgtatcgagtttttattttcgtttatatttacgtaggcgtttttttttatttgtatcgagtttttcgtttcgtttatatttacgtaggcgtttttttttatttgtatcgagtttttattttcgtttatatttacgtaggcgtttttttttatttgtatcgagtttttcgtttcgtttatatttacgtaggcgtttttttttatttgtatcgagtttttattttcgtttatatttacgtaggcgtttttttttatttgtatcgagtttttattttcgtttatatttacgtaggcgtttttttttatttgtatcgagtttttattttcgtttatatttacgtaggcgtttttttttatttgtatcgagtttttcgtttcgtttatatttacgtaggcgtttttttttatttgtatcgggtttgtcgtttcgtttatatttacgtatgcgtttttttttatttgtattgggtttgttattttgtttatatttatgtttgcgttttttttttgtttttttaatttaga

SEQ ID NO: 40658 - DNA, 3037 bp, Artificial Sequence
  chemically treated genomic DNA (Homo sapiens) CpG-island No: 40658
tctaaattaaaaaaacaaaaaaaaaacgcaaacataaatataaacaaaataacaaacccaatacaaataaaaaaaaacgcatacgtaaatataaacgaaacgacaaacccgatacaaataaaaaaaaacgcctacgtaaatataaacgaaacgaaaaactcgatacaaataaaaaaaaacgcctacgtaaatataaacgaaaataaaaactcgatacaaataaaaaaaaacgcctacgtaaatataaacgaaaataaaaactcgatacaaataaaaaaaaacgcctacgtaaatataaacgaaaataaaaactcgatacaaataaaaaaaaacgcctacgtaaatataaacgaaacgaaaaactcgatacaaataaaaaaaaacgcctacgtaaatataaacgaaaataaaaactcgatacaaataaaaaaaaacgcctacgtaaatataaacgaaacgaaaaactcgatacaaataaaaaaaaacgcctacgtaaatataaacgaaaataaaaactcgatacaaataaaaaaaaacgcctacgtaaatataaacgaaacgaaaaactcgatacaaataaaaaaaaacgcctacgtaaatataaacgaaaataaaaactcgatacaaataaaaaaaaacgcctacgtaaatataaacgaaaataaaaactcgatacaaataaaaaaaaacgcctacgtaaatataaacgaaaataaaaactcgatacaaataaaaaaaaacgcctacgtaaatataaacgaaacgaaaaactcgatacaaataaaaaaaaacgcctacgtaaatataaacgaaaataaaaactcgatacaaataaaaaaaaacgcctacgtaaatataaacgaaacgaaaaactcgatacaaataaaaaaaaacgcctacgtaaatataaacgaaaataaaaactcgatacaaataaaaaaaaacgcctacgtaaatataaacgaaacgaaaaactcgatacaaataaaaaaaaacgcctacgtaaatataaacgaaaataaaaactcgatacaaataaaaaaaaacgcctacgtaaatataaacgaaaataaaaactcgatacaaataaaaaaaaacgcctacgtaaatataaacgaaacgacaaacccgatacaaataaaaaaaaacgcctacgtaaatataaacgaaaataaaaactcgatacaaataaaaaaaaacgcctacgtaaatataaacgaaacgaaaaactcgatacaaataaaaaaaaacgcctacgtaaatataaacgaaaataaaaactcgatacaaataaaaaaaaacgcctacgtaaatataaacgaaacgaaaaactcgatacaaataaaaaaaaacgcctacgtaaatataaacgaaaataaaaactcgatacaaataaaaaaaaacgcctacgtaaatataaacgaaaataaaaactcgatacaaataaaaaaaaacgcctacgtaaatataaacgaaacgacaaactcgatacaaataaaaaacaacgcctacgtaaatataaacgaaacgacaaactcgatacaaataaaaaaaaacgcctacgtaaatataaacgaaaataaaaactcgatacaaataaaaaaaaacgcctacgtaaatataaacgaaacgaaaaactcgatacaaataaaaaaaaacgcctacgtaaatataaacgaaacgaaaaactcgatacaaataaaaaaaaacgcctacgtaaatataaacgaaacgaaaaactcgatacaaataaaaaaaaacgcctacgtaaatataaaccgaacgaaaaactcgatacaaataaaaaaaaacgcctacgtaaatataaacgaaacgaaaaactcgatacaaataaaaaaaaacgcctacgtaaatataaacgaaacgaaaaactcgatacaaataaaaaaaaacgcctacataaatataaacgaaaataaaaactcgatacaaataaaaaaaaacgcctacgtaaatataaacgaaaataaaaactcgatacaaataaaaaaaaacgcctacgtaaatataaacgaaacgaaaaactcgatacaaataaaaaaaaacgcctacgtaaatataaacgaaaataaaaactcgatacaaataaaaaaaaacgcctacgtaaatataaacgaaacgaaaaactcgatacaaataaaaaaaaacgcctacgtaaatataaacgaaacgacaaactcgatacaaataaaaaaaaacgcctacgtaaatataaacgaaacgaaaaactcgatacaaataaaaaaaaacgcctacgtaaatataaacgaaaataaaaactcgatacaaataaaaaaaaacgcctacgtaaatataaacgaaacgaaaaactcgatacaaataaaaaaaaacgcctacgtaaatataaacgaaacgacaaactcgatacaaataaaaaaaaacgcctacgtaaatataaacgaaacgacaaactcgatacaaataaaaaaaaacgcctacgtaaatataaacgaaacgaaaaactcgatacaaataaaaaaaaacgcctacgtaaatataaacgaaacgaaaaactcgatacaaataaaaaaaaacgcctacgtaaatataaacgaaacgaaaaactcgatataaataaaaaaaaacgcctacgtaaatataaacgaaacgaaaaactcgatacaaataaaaaaaaacgcctacgtaaatataaacgaaacgaaaaactcgatacaaataaaaaaaaacgcctacgtaaatataaacgaaacgaaaaactcgatacaaataaaaaaaaacgcctacgtaaatataaacgaaacgaaaaactcgatacaaataaaaaaaaacgcctacgtaaatataaacgaaacgaaaaactcgatacaaataaaaaaaaacgcctacgtaaatataaacgaaaataaaaactcgatacaaataaaaaaaaacgcctacgtaaatataaacgaaacgaaaaactcgatacaaataaaaaaaaacgcatacgtaaatataaataacgcgacaaacttaatattaatactcgcttctc

SEQ ID NO: 40659 - DNA, 3037 bp, Artificial Sequence
  chemically treated genomic DNA (Homo sapiens) CpG-island No: 40659
tttggattgaaaaggtaagaggaaaacgtaggtatagatataaatagggtggtaggtttagtgtaggtaaggggaaacgtatgcgtggatgtaaacggggcggtaggttcggtgtaggtaaggggaaacgtttgcgtggatataaacggggcgggaggttcggtgtaggtaaggggaaacgtttgcgtggatataaacgggaatggaggttcggtgtaggtaaggggaaacgtttgcgtggatataaacgggaatggaggttcggtgtaggtaaggggaaacgtttgcgtggatataaacgggaatggaggttcggtgtaggtaaggggaaacgtttgcgtggatgtaaacggggcgggaggttcggtgtaggtaaggggaaacgtttgcgtggatataaacgggaatggaggttcggtgtaggtaaggggaaacgtttgcgtggatgtaaacggggcgggaggttcggtgtaggtaaggggaaacgtttgcgtggatataaacgggaatggaggttcggtgtaggtaaggggaaacgtttgcgtggatgtaaacggggcgggaggttcggtgtaggtaaggggaaacgtttgcgtggatataaacgggaatggaggttcggtgtaggtaaggggaaacgtttgcgtggatataaacgggaatggaggttcggtgtaggtaaggggaaacgtttgcgtggatataaacgggaatggaggttcggtgtaggtaaggggaaacgtttgcgtggatgtaaacggggcgggaggttcggtgtaggtaaggggaaacgtttgcgtggatataaacgggaatggaggttcggtgtaggtaaggggaaacgtttgcgtggatgtaaacggggcgggaggttcggtgtaggtaaggggaaacgtttgcgtggatataaacgggaatggaggttcggtgtaggtaaggggaaacgtttgcgtggatgtaaacggggcgggaggttcggtgtaggtaaggggaaacgtttgcgtggatataaacgggaatggaggttcggtgtaggtaaggggaaacgtttgcgtggatataaacgggaatggaggttcggtgtaggtaaggggaaacgtttgcgtggatgtaaacggggcggtaggttcggtgtaggtaaggggaaacgtttgcgtggatataaacgggaatggaggttcggtgtaggtaaggggaaacgtttgcgtggatgtaaacggggcgggaggttcggtgtaggtaaggggaaacgtttgcgtggatataaacgggaatggaggttcggtgtaggtaaggggaaacgtttgcgtggatgtaaacggggcgggaggttcggtgtaggtaaggggaaacgtttgcgtggatataaacgggaatggaggttcggtgtaggtaaggggaaacgtttgcgtggatataaacgggaatggaggttcggtgtaggtaaggggaaacgtttgcgtggatgtaaacggggcggtaggttcggtgtaggtaaggggtaacgtttgcgtggatgtaaacggggcggtaggttcggtgtaggtaaggggaaacgtttgcgtggatataaacgggaatggaggttcggtgtaggtaaggggaaacgtttgcgtggatgtaaacggggcgggaggttcggtgtaggtaaggggaaacgtttgcgtggatgtaaacggggcgggaggttcggtgtaggtaaggggaaacgtttgcgtggatgtaaacggggcgggaggttcggtgtaggtaaggggaaacgtttgcgtggatgtaaatcgggcgggaggttcggtgtaggtaaggggaaacgtttgcgtggatgtaaacggggcgggaggttcggtgtaggtaaggggaaacgtttgcgtggatgtaaacggggcgggaggttcggtgtaggtaaggggaaacgtttgtatggatataaacgggaatggaggttcggtgtaggtaaggggaaacgtttgcgtggatgtaaacgggaatggaggttcggtgtaggtaaggggaaacgtttgcgtggatgtaaacggggcgggaggttcggtgtaggtaaggggaaacgtttgcgtggatgtaaacgggaatggaggttcggtgtaggtaaggggaaacgtttgcgtggatataaacggggcgggaggttcggtgtaggtaaggggaaacgtttgcgtggatgtaaacggggcggtaggttcggtgtaggtaaggggaaacgtttgcgtggatgtaaacggggcgggaggttcggtgtaggtaaggggaaacgtttgcgtggatgtaaacgggaatggaggttcggtgtaggtaaggggaaacgtttgcgtggatataaacggggcgggaggttcggtgtaggtaaggggaaacgtttgcgtggatgtaaacggggcggtaggttcggtgtaggtaaggggaaacgtttgcgtggatgtaaacggggcggtaggttcggtgtaggtaaggggaaacgtttgcgtggatgtaaacggggcgggaggttcggtgtaggtaaggggaaacgtttgcgtggatgtaaacggggcgggaggttcggtgtaggtaaggggaaacgtttgcgtggatgtaaacggggcgggaggttcggtgtaggtaaggggaaacgtttgcgtggatgtaaacggggcgggaggttcggtgtaggtaaggggaaacgtttgcgtggatgtaaacggggcgggaggttcggtgtaggtaaggggaaacgtttgcgtggatgtaaacggggcgggaggttcggtgtaggtaaggggaaacgtttgcgtggatgtaaacggggcgggaggttcggtgtaggtaaggggaaacgtttgcgtggatgtaaacggggcgggaggttcggtgtaggtaaggggaaacgtttgcgtggatataaacgggaatggaggttcggtgtaggtaaggggaaacgtttgcgtggatgtaaacggggcgggaggttcggtgtaggtaaggggaaacgtatgcgtggatataaatggcgcggtaggtttgatgttggtattcgtttttt

SEQ ID NO: 40660 - DNA, 3037 bp, Artificial Sequence
  chemically treated genomic DNA (Homo sapiens) CpG-island No: 40660
aaaaaacgaataccaacatcaaacctaccgcgccatttatatccacgcatacgtttccccttacctacaccgaacctcccgccccgtttacatccacgcaaacgtttccccttacctacaccgaacctccattcccgtttatatccacgcaaacgtttccccttacctacaccgaacctcccgccccgtttacatccacgcaaacgtttccccttacctacaccgaacctcccgccccgtttacatccacgcaaacgtttccccttacctacaccgaacctcccgccccgtttacatccacgcaaacgtttccccttacctacaccgaacctcccgccccgtttacatccacgcaaacgtttccccttacctacaccgaacctcccgccccgtttacatccacgcaaacgtttccccttacctacaccgaacctcccgccccgtttacatccacgcaaacgtttccccttacctacaccgaacctcccgccccgtttacatccacgcaaacgtttccccttacctacaccgaacctcccgccccgtttacatccacgcaaacgtttccccttacctacaccgaacctaccgccccgtttacatccacgcaaacgtttccccttacctacaccgaacctaccgccccgtttacatccacgcaaacgtttccccttacctacaccgaacctcccgccccgtttatatccacgcaaacgtttccccttacctacaccgaacctccattcccgtttacatccacgcaaacgtttccccttacctacaccgaacctcccgccccgtttacatccacgcaaacgtttccccttacctacaccgaacctaccgccccgtttacatccacgcaaacgtttccccttacctacaccgaacctcccgccccgtttatatccacgcaaacgtttccccttacctacaccgaacctccattcccgtttacatccacgcaaacgtttccccttacctacaccgaacctcccgccccgtttacatccacgcaaacgtttccccttacctacaccgaacctccattcccgtttacatccacgcaaacgtttccccttacctacaccgaacctccattcccgtttatatccatacaaacgtttccccttacctacaccgaacctcccgccccgtttacatccacgcaaacgtttccccttacctacaccgaacctcccgccccgtttacatccacgcaaacgtttccccttacctacaccgaacctcccgcccgatttacatccacgcaaacgtttccccttacctacaccgaacctcccgccccgtttacatccacgcaaacgtttccccttacctacaccgaacctcccgccccgtttacatccacgcaaacgtttccccttacctacaccgaacctcccgccccgtttacatccacgcaaacgtttccccttacctacaccgaacctccattcccgtttatatccacgcaaacgtttccccttacctacaccgaacctaccgccccgtttacatccacgcaaacgttaccccttacctacaccgaacctaccgccccgtttacatccacgcaaacgtttccccttacctacaccgaacctccattcccgtttatatccacgcaaacgtttccccttacctacaccgaacctccattcccgtttatatccacgcaaacgtttccccttacctacaccgaacctcccgccccgtttacatccacgcaaacgtttccccttacctacaccgaacctccattcccgtttatatccacgcaaacgtttccccttacctacaccgaacctcccgccccgtttacatccacgcaaacgtttccccttacctacaccgaacctccattcccgtttatatccacgcaaacgtttccccttacctacaccgaacctaccgccccgtttacatccacgcaaacgtttccccttacctacaccgaacctccattcccgtttatatccacgcaaacgtttccccttacctacaccgaacctccattcccgtttatatccacgcaaacgtttccccttacctacaccgaacctcccgccccgtttacatccacgcaaacgtttccccttacctacaccgaacctccattcccgtttatatccacgcaaacgtttccccttacctacaccgaacctcccgccccgtttacatccacgcaaacgtttccccttacctacaccgaacctccattcccgtttatatccacgcaaacgtttccccttacctacaccgaacctcccgccccgtttacatccacgcaaacgtttccccttacctacaccgaacctccattcccgtttatatccacgcaaacgtttccccttacctacaccgaacctccattcccgtttatatccacgcaaacgtttccccttacctacaccgaacctccattcccgtttatatccacgcaaacgtttccccttacctacaccgaacctcccgccccgtttacatccacgcaaacgtttccccttacctacaccgaacctccattcccgtttatatccacgcaaacgtttccccttacctacaccgaacctcccgccccgtttacatccacgcaaacgtttccccttacctacaccgaacctccattcccgtttatatccacgcaaacgtttccccttacctacaccgaacctcccgccccgtttacatccacgcaaacgtttccccttacctacaccgaacctccattcccgtttatatccacgcaaacgtttccccttacctacaccgaacctccattcccgtttatatccacgcaaacgtttccccttacctacaccgaacctccattcccgtttatatccacgcaaacgtttccccttacctacaccgaacctcccgccccgtttatatccacgcaaacgtttccccttacctacaccgaacctaccgccccgtttacatccacgcatacgtttccccttacctacactaaacctaccaccctatttatatctatacctacgttttcctcttaccttttcaatccaaa

SEQ ID NO: 40661 - DNA, 905 bp, Artificial Sequence
  chemically treated genomic DNA (Homo sapiens) CpG-island No: 40661
ggacggaattgagaagcgagtattaatattaagtttgtcgcgttatttatatttacgtatgcgtttttttttatttgtatcgagtttttcgtttcgtttatatttacgtaggcgtttttttttatttgtatcgagtttttattttcgtttatatttacgtaggcgtttttttttatttgtatcgagtttgtcgtttcgtttatatttacgtaggcgtttttttttatttgtattgagtttttcgtttcgtttatatttacgtaggcgtttttttttatttgtatcgagtttttcgtttcgtttatatttacgtaggcgtttttttttatttgtatcgagtttttcgtttcgtttatatttacgtaggcgtttttttttatttgtatcgagtttttattttcgtttatatttacgtaggcgtttttttttatttgtatcgagtttttcgtttcgtttatatttacgtaggcgtttttttttatttgtatcgagtttttcgtttcgtttatatttacgtaggcgtttttttttatttgtatcgagtttttattttcgtttatatttacgtaggcgtttttttttatttgtatcgagtttttattttcgtttatatttacgtaggcgtttttttttatttgtatcgagtttttcgtttcgtttatatttacgtaggcgtttttttttatttgtatcgggtttttattttcgtttatatttacgtaggcgtttttttttatttgtatcgagtttttattttcgtttatatttacgtaggcgtttttttttatttgtatcgggtttgtcgtttcgtttatatttacgtatgcgtttttttttatttgtattgggtttgttattttgtttatatttatgtttgcgttttttttttgtttttttaatttaga

SEQ ID NO: 40662 - DNA, 905 bp, Artificial Sequence
  chemically treated genomic DNA (Homo sapiens) CpG-island No: 40662
tctaaattaaaaaaacaaaaaaaaaacgcaaacataaatataaacaaaataacaaacccaatacaaataaaaaaaaacgcatacgtaaatataaacgaaacgacaaacccgatacaaataaaaaaaaacgcctacgtaaatataaacgaaaataaaaactcgatacaaataaaaaaaaacgcctacgtaaatataaacgaaaataaaaacccgatacaaataaaaaaaaacgcctacgtaaatataaacgaaacgaaaaactcgatacaaataaaaaaaaacgcctacgtaaatataaacgaaaataaaaactcgatacaaataaaaaaaaacgcctacgtaaatataaacgaaaataaaaactcgatacaaataaaaaaaaacgcctacgtaaatataaacgaaacgaaaaactcgatacaaataaaaaaaaacgcctacgtaaatataaacgaaacgaaaaactcgatacaaataaaaaaaaacgcctacgtaaatataaacgaaaataaaaactcgatacaaataaaaaaaaacgcctacgtaaatataaacgaaacgaaaaactcgatacaaataaaaaaaaacgcctacgtaaatataaacgaaacgaaaaactcgatacaaataaaaaaaaacgcctacgtaaatataaacgaaacgaaaaactcaatacaaataaaaaaaaacgcctacgtaaatataaacgaaacgacaaactcgatacaaataaaaaaaaacgcctacgtaaatataaacgaaaataaaaactcgatacaaataaaaaaaaacgcctacgtaaatataaacgaaacgaaaaactcgatacaaataaaaaaaaacgcatacgtaaatataaataacgcgacaaacttaatattaatactcgcttctcaattccgtcc

SEQ ID NO: 40663 - DNA, 905 bp, Artificial Sequence
  chemically treated genomic DNA (Homo sapiens) CpG-island No: 40663
tttggattgaaaaggtaagaggaaaacgtaggtatagatataaatagggtggtaggtttagtgtaggtaaggggaaacgtatgcgtggatgtaaacggggcggtaggttcggtgtaggtaaggggaaacgtttgcgtggatataaacgggaatggaggttcggtgtaggtaaggggaaacgtttgcgtggatataaacgggaatggaggttcggtgtaggtaaggggaaacgtttgcgtggatataaacggggcgggaggttcggtgtaggtaaggggaaacgtttgcgtggatataaacgggaatggaggttcggtgtaggtaaggggaaacgtttgcgtggatgtaaacgggaatggaggttcggtgtaggtaaggggaaacgtttgcgtggatataaacggggcgggaggttcggtgtaggtaaggggaaacgtttgcgtggatgtaaacggggcgggaggttcggtgtaggtaaggggaaacgtttgcgtggatgtaaacgggaatggaggttcggtgtaggtaaggggaaacgtttgcgtggatataaacggggcgggaggttcggtgtaggtaaggggaaacgtttgcgtggatgtaaacggggcgggaggttcggtgtaggtaaggggaaacgtttgcgtggatataaacggggcgggaggtttagtgtaggtaaggggaaacgtttgcgtggatgtaaacggggcggtaggttcggtgtaggtaaggggaaacgtttgcgtggatgtaaacgggaatggaggttcggtgtaggtaaggggaaacgtttgcgtggatgtaaacggggcgggaggttcggtgtaggtaaggggaaacgtatgcgtggatataaatggcgcggtaggtttgatgttggtattcgttttttagtttcgttt

SEQ ID NO: 40664 - DNA, 905 bp, Artificial Sequence
  chemically treated genomic DNA (Homo sapiens) CpG-island No: 40664
aaacgaaactaaaaaacgaataccaacatcaaacctaccgcgccatttatatccacgcatacgtttccccttacctacaccgaacctcccgccccgtttacatccacgcaaacgtttccccttacctacaccgaacctccattcccgtttacatccacgcaaacgtttccccttacctacaccgaacctaccgccccgtttacatccacgcaaacgtttccccttacctacactaaacctcccgccccgtttatatccacgcaaacgtttccccttacctacaccgaacctcccgccccgtttacatccacgcaaacgtttccccttacctacaccgaacctcccgccccgtttatatccacgcaaacgtttccccttacctacaccgaacctccattcccgtttacatccacgcaaacgtttccccttacctacaccgaacctcccgccccgtttacatccacgcaaacgtttccccttacctacaccgaacctcccgccccgtttatatccacgcaaacgtttccccttacctacaccgaacctccattcccgtttacatccacgcaaacgtttccccttacctacaccgaacctccattcccgtttatatccacgcaaacgtttccccttacctacaccgaacctcccgccccgtttatatccacgcaaacgtttccccttacctacaccgaacctccattcccgtttatatccacgcaaacgtttccccttacctacaccgaacctccattcccgtttatatccacgcaaacgtttccccttacctacaccgaacctaccgccccgtttacatccacgcatacgtttccccttacctacactaaacctaccaccctatttatatctatacctacgttttcctcttaccttttcaatccaaa

SEQ ID NO: 40665 - DNA, 989 bp, Artificial Sequence
  chemically treated genomic DNA (Homo sapiens) CpG-island No: 40665
cggcgtatattttatttatatgtagcgtacggttacgtagtgcgtattttatatatatatagcgtacgattacgtggtttgtattttatttatatagtatacgattacgcggcgcgtattttatttatatagcgtataattacgcggcgcgtattttatatagcgtacgattacgcggcgtatattttatttatatagcgtacgattatacggcgcgtattttatatagtatacgattacgcggcgcgtattttatatagtatacgattacgcggcgcgtattttatagtatacgattacgtagcgtgtattttatatatagcgtacgattatatcgcgtattttatatatatagcgtacgattacgcggcgcgtattttatttatatagcgtacgattacgcggcgtatattttatttatatagcgtacgattatacggcgcgtattttatatagtatacgattacgcggcgcgtattttatatagtatacgattacgcggcgcgtattttatatagtatacgattacgcggcgcgtattttatttatagtatacgattatatcgcgtattttatatatatagcgtacgattacgcggcgtatattttatatagtatacgattacgcggcgcgtattttatatagtatacgattacgcggcgcgtattttatttatagtatacgattacgtagcgtgtattttatatatagcgtacgattatatcgcgtattttatatatatagcgtacgattacgcggcgtgtattatatatatagcgtacgattatattacgtattttatatatatatatagcgtacgattacgcggcgcgtattttatatagtatacgattacgtagcgtgtattttatatatatatagcgtataattatatcgcgtattttatatatatatagcgtaggtattaaggagttttgtttggtatattcggttgttgttaaatatttttaggaagttgagaaggttt

SEQ ID NO: 40666 - DNA, 989 bp, Artificial Sequence
  chemically treated genomic DNA (Homo sapiens) CpG-island No: 40666
aaaccttctcaacttcctaaaaatatttaacaacaaccgaatataccaaacaaaactccttaatacctacgctatatatatataaaatacgcgatataattatacgctatatatatataaaatacacgctacgtaatcgtatactatataaaatacgcgccgcgtaatcgtacgctatatatatatataaaatacgtaatataatcgtacgctatatatataatacacgccgcgtaatcgtacgctatatatataaaatacgcgatataatcgtacgctatatataaaatacacgctacgtaatcgtatactataaataaaatacgcgccgcgtaatcgtatactatataaaatacgcgccgcgtaatcgtatactatataaaatatacgccgcgtaatcgtacgctatatatataaaatacgcgatataatcgtatactataaataaaatacgcgccgcgtaatcgtatactatataaaatacgcgccgcgtaatcgtatactatataaaatacgcgccgcgtaatcgtatactatataaaatacgcgccgtataatcgtacgctatataaataaaatatacgccgcgtaatcgtacgctatataaataaaatacgcgccgcgtaatcgtacgctatatatataaaatacgcgatataatcgtacgctatatataaaatacacgctacgtaatcgtatactataaaatacgcgccgcgtaatcgtatactatataaaatacgcgccgcgtaatcgtatactatataaaatacgcgccgtataatcgtacgctatataaataaaatatacgccgcgtaatcgtacgctatataaaatacgcgccgcgtaattatacgctatataaataaaatacgcgccgcgtaatcgtatactatataaataaaatacaaaccacgtaatcgtacgctatatatatataaaatacgcactacgtaaccgtacgctacatataaataaaatatacgccg

SEQ ID NO: 40667 - DNA, 989 bp, Artificial Sequence
  chemically treated genomic DNA (Homo sapiens) CpG-island No: 40667
gaatttttttaattttttaggaatgtttagtagtaatcgaatatattaggtaaaattttttggtgtttgcgttgtgtgtgtgtgaggtgcgcggtgtgattgtgcgttgtgtgtgtgtgaggtgtacgttgcgtgatcgtgtgttgtgtgaggtgcgcgtcgcgtgatcgtgcgttgtgtgtgtgtgtgaggtgcgtggtgtgatcgtgcgttgtgtgtgtggtgtacgtcgcgtgatcgtgcgttgtgtgtgtgaggtgcgcggtgtgatcgtgcgttgtgtgtgaggtgtacgttgcgtgatcgtgtgttgtgagtgaggtgcgcgtcgcgtgatcgtgtgttgtgtgaggtgcgcgtcgcgtgatcgtgtgttgtgtgaggtgtgcgtcgcgtgatcgtgcgttgtgtgtgtgaggtgcgcggtgtgatcgtgtgttgtgagtgaggtgcgcgtcgcgtgatcgtgtgttgtgtgaggtgcgcgtcgcgtgatcgtgtgttgtgtgaggtgcgcgtcgcgtgatcgtgtgttgtgtgaggtgcgcgtcgtgtgatcgtgcgttgtgtgagtgaggtgtgcgtcgcgtgatcgtgcgttgtgtgagtgaggtgcgcgtcgcgtgatcgtgcgttgtgtgtgtgaggtgcgcggtgtgatcgtgcgttgtgtgtgaggtgtacgttgcgtgatcgtgtgttgtgaggtgcgcgtcgcgtgatcgtgtgttgtgtgaggtgcgcgtcgcgtgatcgtgtgttgtgtgaggtgcgcgtcgtgtgatcgtgcgttgtgtgagtgaggtgtgcgtcgcgtgatcgtgcgttgtgtgaggtgcgcgtcgcgtgattgtgcgttgtgtgagtgaggtgcgcgtcgcgtgatcgtgtgttgtgtgagtgaggtgtaggttacgtgatcgtgcgttgtgtgtgtgtgaggtgcgtattgcgtgatcgtgcgttgtatgtgagtgaggtgtgcgtcg

SEQ ID NO: 40668 - DNA, 989 bp, Artificial Sequence
  chemically treated genomic DNA (Homo sapiens) CpG-island No: 40668
cgacgcacacctcactcacatacaacgcacgatcacgcaatacgcacctcacacacacacaacgcacgatcacgtaacctacacctcactcacacaacacacgatcacgcgacgcgcacctcactcacacaacgcacaatcacgcgacgcgcacctcacacaacgcacgatcacgcgacgcacacctcactcacacaacgcacgatcacacgacgcgcacctcacacaacacacgatcacgcgacgcgcacctcacacaacacacgatcacgcgacgcgcacctcacaacacacgatcacgcaacgtacacctcacacacaacgcacgatcacaccgcgcacctcacacacacaacgcacgatcacgcgacgcgcacctcactcacacaacgcacgatcacgcgacgcacacctcactcacacaacgcacgatcacacgacgcgcacctcacacaacacacgatcacgcgacgcgcacctcacacaacacacgatcacgcgacgcgcacctcacacaacacacgatcacgcgacgcgcacctcactcacaacacacgatcacaccgcgcacctcacacacacaacgcacgatcacgcgacgcacacctcacacaacacacgatcacgcgacgcgcacctcacacaacacacgatcacgcgacgcgcacctcactcacaacacacgatcacgcaacgtacacctcacacacaacgcacgatcacaccgcgcacctcacacacacaacgcacgatcacgcgacgtacaccacacacacaacgcacgatcacaccacgcacctcacacacacacacaacgcacgatcacgcgacgcgcacctcacacaacacacgatcacgcaacgtacacctcacacacacacaacgcacaatcacaccgcgcacctcacacacacacaacgcaaacaccaaaaaattttacctaatatattcgattactactaaacattcctaaaaaattaaaaaaattc

SEQ ID NO: 40669 - DNA, 835 bp, Artificial Sequence
  chemically treated genomic DNA (Homo sapiens) CpG-island No: 40669
agcgttcgggtggatatgtaagtcggtttagcgtagacgtttgagaggggtgtttagtagttttcgtaggttttcgtcgcgttttcgttatagcgtttaggcgttcgtagggtatagggatcggtattagtcggtgacgtgttttttacgttgttgtttgtgattggtggtttcgattcggggcgtggttttaagggaggtatttagttttattggggatgcgcgcgtagatttacggtttttgtttcgtttttagttggtttgtaattggcgtagtcggtttaaggggcggttgtttaggcgcgggtgcgcgcgtagttgttgtggttttgtttggtgcgttcgttgttatcgttatggttgtttcgtgtttgttgcggtaaggacgagtcggggcgttgaaggtaaaggaggagttagtttgggttggttgcgcggtttcgagtttacgtaggggatggggtgagggggcgcggtgttggttaggttcgggtttgttcgcgatttttagtcgttttagttgggtcgttgatttcgttttttgggtttaggattgatcgttacggggttaggttcggatgtggttagcgagcgtttcgcggttttttcgagtcggttcgtcgtcgtcgttgttcgaggtttaggtcgaggttggcgtgtttcgtgtcgacgggcgttttcgagggttgtatgtttgggcggtagattcgggtggacgtttttaggtgatgttgtcgcgcggttggggttagtcgttgtgcggttttcgtacggtttttttgaaggatagtgatttttttatttagttaagagaggaaatgagggaatttttagg

SEQ ID NO: 40670 - DNA, 835 bp, Artificial Sequence
  chemically treated genomic DNA (Homo sapiens) CpG-island No: 40670
cctaaaaattccctcatttcctctcttaactaaataaaaaaatcactatccttcaaaaaaaccgtacgaaaaccgcacaacgactaaccccaaccgcgcgacaacatcacctaaaaacgtccacccgaatctaccgcccaaacatacaaccctcgaaaacgcccgtcgacacgaaacacgccaacctcgacctaaacctcgaacaacgacgacgacgaaccgactcgaaaaaaccgcgaaacgctcgctaaccacatccgaacctaaccccgtaacgatcaatcctaaacccaaaaaacgaaatcaacgacccaactaaaacgactaaaaatcgcgaacaaacccgaacctaaccaacaccgcgccccctcaccccatcccctacgtaaactcgaaaccgcgcaaccaacccaaactaactcctcctttaccttcaacgccccgactcgtccttaccgcaacaaacacgaaacaaccataacgataacaacgaacgcaccaaacaaaaccacaacaactacgcgcgcacccgcgcctaaacaaccgccccttaaaccgactacgccaattacaaaccaactaaaaacgaaacaaaaaccgtaaatctacgcgcgcatccccaataaaactaaatacctcccttaaaaccacgccccgaatcgaaaccaccaatcacaaacaacaacgtaaaaaacacgtcaccgactaataccgatccctataccctacgaacgcctaaacgctataacgaaaacgcgacgaaaacctacgaaaactactaaacacccctctcaaacgtctacgctaaaccgacttacatatccacccgaacgct

SEQ ID NO: 40671 - DNA, 835 bp, Artificial Sequence
  chemically treated genomic DNA (Homo sapiens) CpG-island No: 40671
tttgaaagtttttttatttttttttttggttaaatggagaagttattgttttttagagaagtcgtgcgggagtcgtatagcggttgattttagtcgcgcggtagtattatttgggaacgtttattcgagtttgtcgtttaggtatgtagttttcgggagcgttcgtcggtacggggtacgttagtttcggtttgggtttcgggtagcggcggcggcggatcggttcgggggaatcgcgggacgttcgttggttatattcgggtttggtttcgtggcggttagttttgggtttagggagcggggttagcggtttaattaggacggttagaggtcgcggataggttcggatttgattagtatcgcgtttttttattttattttttacgtaggttcggggtcgcgtagttagtttaggttggttttttttttatttttagcgtttcggttcgtttttgtcgtagtaaatacggggtagttatggcggtgatagcgggcgtattaagtagggttatagtagttgcgcgcgtattcgcgtttgaatagtcgttttttgggtcgattgcgttaattataggttagttgggggcggagtagaggtcgtgggtttgcgcgcgtatttttagtagggttaagtgttttttttggggttacgtttcggatcgggattattaattataggtagtagcgtgagggatacgttatcggttggtgtcgatttttgtgttttgcgggcgtttgggcgttgtggcgggggcgcggcggagatttgcgggggttgttgggtattttttttaggcgtttgcgttgggtcggtttgtatgtttattcgaacgtt

SEQ ID NO: 40672 - DNA, 835 bp, Artificial Sequence
  chemically treated genomic DNA (Homo sapiens) CpG-island No: 40672
aacgttcgaataaacatacaaaccgacccaacgcaaacgcctaaaaaaaatacccaacaacccccgcaaatctccgccgcgcccccgccacaacgcccaaacgcccgcaaaacacaaaaatcgacaccaaccgataacgtatccctcacgctactacctataattaataatcccgatccgaaacgtaaccccaaaaaaaacacttaaccctactaaaaatacgcgcgcaaacccacgacctctactccgcccccaactaacctataattaacgcaatcgacccaaaaaacgactattcaaacgcgaatacgcgcgcaactactataaccctacttaatacgcccgctatcaccgccataactaccccgtatttactacgacaaaaacgaaccgaaacgctaaaaataaaaaaaaaaccaacctaaactaactacgcgaccccgaacctacgtaaaaaataaaataaaaaaacgcgatactaatcaaatccgaacctatccgcgacctctaaccgtcctaattaaaccgctaaccccgctccctaaacccaaaactaaccgccacgaaaccaaacccgaatataaccaacgaacgtcccgcgattcccccgaaccgatccgccgccgccgctacccgaaacccaaaccgaaactaacgtaccccgtaccgacgaacgctcccgaaaactacatacctaaacgacaaactcgaataaacgttcccaaataatactaccgcgcgactaaaatcaaccgctatacgactcccgcacgacttctctaaaaaacaataacttctccatttaaccaaaaaaaaaaataaaaaaactttcaaa

SEQ ID NO: 40673 - DNA, 1396 bp, Artificial Sequence
  chemically treated genomic DNA (Homo sapiens) CpG-island No: 40673
ttcggttacgggacgttcggcggtggggttacggatggtatagtttttttttttcgtttgttcgaggtaaatggtttcgttcggttatatatattttttttgggcggtaatcgagggcgcggagggggtaagacgtgcgttgaggttacgtttttattgtatagttataaggcgggaggttttgttttcggggcggggtagatagtttttcgcgttcgggcgcggtcggttgggggtacggtttagtttcgggtgcgggcggggttggaggcggggtcggttatcgttcggttttcgttttcgttttttttttttagcgattaggtttcgtttcgcgttcgtcgtcgcgtagggaggggcggggttcgttttcggtaggtttcgttttttttttgaatattgatgcggcgcgcgtcggcgtcgttttttttttattgagcgaggttgtgtcgcgtggtttagcgtcggcgtgacggttggacgcgggcgcggtattgcgggtttcgattgttgtagtcgtttgttagtgtgatgaagattggtatttaggtaagttgttatttaatcgtttcgtcgtcgtcgtcgtcgttttcgtcgtcgtcgtttttattaattatatcggttcgcggtcgtcgttcgtcgtcgtcgttgtcgttcgggtttggagggtcggcgttgttttcgagggttcgtatttgattcgtcgttcggggtagggggcggggagggggcgcgggtgggggaggggagcgggtattcgcgggggagggggcgtttttagtttaatcggcgcgggggcgcgtttagttggttttttagtgtgggttgagggacgcggaaatttttggaaggcgtcgtcgtcgtcgcgttgggtttgatcgaagcgcgcgtttttaatcgtttttttcggagtgcggcgcgcgtttcggcgcggggcgggggcgcgcggagttcggcgcgggcggggcggcgggcgtgagggtcgggggcgcgcggcggggcggggtcggggcgggcggcgcgcgtggggtcggtcgggttcgcggtttcgcggagtttttagggtcggcggggttgttcggagggtgcggggcgcgcggcggcgtaggcgggaagatggcggtcgcgatttcggtttcggtttcggtcgtggcgagcgggtgggtcggggttttgggggcggtgggcgtgatggggttcgtggtttttagtcgggcgtcggcgcgggagtagtttagggtcgttcgttgacggtagtgtttggggtcgggtgttggggaagcggtttcggcgtttcgggaattggtgggaagagtcgtttttgttatacgggtcgtggtaatggatgataggaagtgtcgggtagggtttgggcgttttgtgggtttgtattttt

SEQ ID NO: 40674 - DNA, 1396 bp, Artificial Sequence
  chemically treated genomic DNA (Homo sapiens) CpG-island No: 40674
aaaaatacaaacccacaaaacgcccaaaccctacccgacacttcctatcatccattaccacgacccgtataacaaaaacgactcttcccaccaattcccgaaacgccgaaaccgcttccccaacacccgaccccaaacactaccgtcaacgaacgaccctaaactactcccgcgccgacgcccgactaaaaaccacgaaccccatcacgcccaccgcccccaaaaccccgacccacccgctcgccacgaccgaaaccgaaaccgaaatcgcgaccgccatcttcccgcctacgccgccgcgcgccccgcaccctccgaacaaccccgccgaccctaaaaactccgcgaaaccgcgaacccgaccgaccccacgcgcgccgcccgccccgaccccgccccgccgcgcgcccccgaccctcacgcccgccgccccgcccgcgccgaactccgcgcgcccccgccccgcgccgaaacgcgcgccgcactccgaaaaaaacgattaaaaacgcgcgcttcgatcaaacccaacgcgacgacgacgacgccttccaaaaatttccgcgtccctcaacccacactaaaaaaccaactaaacgcgcccccgcgccgattaaactaaaaacgccccctcccccgcgaatacccgctcccctcccccacccgcgccccctccccgccccctaccccgaacgacgaatcaaatacgaaccctcgaaaacaacgccgaccctccaaacccgaacgacaacgacgacgacgaacgacgaccgcgaaccgatataattaataaaaacgacgacgacgaaaacgacgacgacgacgacgaaacgattaaataacaacttacctaaataccaatcttcatcacactaacaaacgactacaacaatcgaaacccgcaataccgcgcccgcgtccaaccgtcacgccgacgctaaaccacgcgacacaacctcgctcaataaaaaaaaaacgacgccgacgcgcgccgcatcaatattcaaaaaaaaaacgaaacctaccgaaaacgaaccccgcccctccctacgcgacgacgaacgcgaaacgaaacctaatcgctaaaaaaaaaaaacgaaaacgaaaaccgaacgataaccgaccccgcctccaaccccgcccgcacccgaaactaaaccgtacccccaaccgaccgcgcccgaacgcgaaaaactatctaccccgccccgaaaacaaaacctcccgccttataactatacaataaaaacgtaacctcaacgcacgtcttaccccctccgcgccctcgattaccgcccaaaaaaaatatatataaccgaacgaaaccatttacctcgaacaaacgaaaaaaaaaaactataccatccgtaaccccaccgccgaacgtcccgtaaccgaa

SEQ ID NO: 40675 - DNA, 1396 bp, Artificial Sequence
  chemically treated genomic DNA (Homo sapiens) CpG-island No: 40675
gaaggtgtaaatttatagggcgtttagattttgttcggtattttttgttatttattattacgattcgtgtgatagaagcggttttttttattaattttcgggacgtcggaatcgtttttttagtattcggttttaaatattgtcgttagcgagcggttttgggttgttttcgcgtcggcgttcggttgagggttacgagttttattacgtttatcgtttttaggatttcgatttattcgttcgttacggtcgaggtcggggtcggggtcgcggtcgttattttttcgtttgcgtcgtcgcgcgtttcgtatttttcgagtagtttcgtcggttttgaggatttcgcgaggtcgcggattcgatcggttttacgcgcgtcgttcgtttcggtttcgtttcgtcgcgcgttttcgatttttacgttcgtcgtttcgttcgcgtcgggtttcgcgcgttttcgtttcgcgtcggggcgcgcgtcgtatttcgaaagggacggttaggagcgcgcgtttcgattaggtttagcgcggcggcggcggcgttttttagaaattttcgcgttttttaatttatattaagaaattaattgggcgcgttttcgcgtcggttgggttgaaggcgttttttttttcgcgggtgttcgttttttttttttattcgcgtttttttttcgttttttgtttcgggcggcgggttaaatgcgggttttcgagggtagcgtcggttttttagattcgggcggtagcggcggcggcgggcggcggtcgcgggtcggtgtgattgatagggacggcggcggcgagagcggcggcggcggcggcggagcggttgagtgatagtttatttgggtgttaatttttattatattgataagcggttgtagtaatcgggattcgtagtgtcgcgttcgcgtttaatcgttacgtcgacgttgggttacgcgatatagtttcgtttaatgggaggagggcgacgtcgacgcgcgtcgtattaatatttagagagggggcggggtttgtcggagacgggtttcgtttttttttgcgcggcggcgggcgcggggcggggtttgatcgttgggggaggagagcgagggcgggaatcgggcggtggtcggtttcgtttttagtttcgttcgtattcggagttaggtcgtgtttttaatcggtcgcgttcgagcgcgaggagttgtttgtttcgtttcgaaggtagagtttttcgttttatgattatgtagtaggggcgtggttttagcgtacgttttgtttttttcgcgttttcggttgtcgtttaggagaggtgtgtgtagtcgggcgaaattatttgtttcgagtaggcggggagggagggttgtattattcgtaattttatcgtcgggcgtttcgtagtcgaa

SEQ ID NO: 40676 - DNA, 1396 bp, Artificial Sequence
  chemically treated genomic DNA (Homo sapiens) CpG-island No: 40676
ttcgactacgaaacgcccgacgataaaattacgaataatacaaccctccctccccgcctactcgaaacaaataatttcgcccgactacacacacctctcctaaacgacaaccgaaaacgcgaaaaaaacaaaacgtacgctaaaaccacgcccctactacataatcataaaacgaaaaactctaccttcgaaacgaaacaaacaactcctcgcgctcgaacgcgaccgattaaaaacacgacctaactccgaatacgaacgaaactaaaaacgaaaccgaccaccgcccgattcccgccctcgctctcctcccccaacgatcaaaccccgccccgcgcccgccgccgcgcaaaaaaaaacgaaacccgtctccgacaaaccccgccccctctctaaatattaatacgacgcgcgtcgacgtcgccctcctcccattaaacgaaactatatcgcgtaacccaacgtcgacgtaacgattaaacgcgaacgcgacactacgaatcccgattactacaaccgcttatcaatataataaaaattaacacccaaataaactatcactcaaccgctccgccgccgccgccgccgctctcgccgccgccgtccctatcaatcacaccgacccgcgaccgccgcccgccgccgccgctaccgcccgaatctaaaaaaccgacgctaccctcgaaaacccgcatttaacccgccgcccgaaacaaaaaacgaaaaaaaaacgcgaataaaaaaaaaaaacgaacacccgcgaaaaaaaaaacgccttcaacccaaccgacgcgaaaacgcgcccaattaatttcttaatataaattaaaaaacgcgaaaatttctaaaaaacgccgccgccgccgcgctaaacctaatcgaaacgcgcgctcctaaccgtccctttcgaaatacgacgcgcgccccgacgcgaaacgaaaacgcgcgaaacccgacgcgaacgaaacgacgaacgtaaaaatcgaaaacgcgcgacgaaacgaaaccgaaacgaacgacgcgcgtaaaaccgatcgaatccgcgacctcgcgaaatcctcaaaaccgacgaaactactcgaaaaatacgaaacgcgcgacgacgcaaacgaaaaaataacgaccgcgaccccgaccccgacctcgaccgtaacgaacgaataaatcgaaatcctaaaaacgataaacgtaataaaactcgtaaccctcaaccgaacgccgacgcgaaaacaacccaaaaccgctcgctaacgacaatatttaaaaccgaatactaaaaaaacgattccgacgtcccgaaaattaataaaaaaaaccgcttctatcacacgaatcgtaataataaataacaaaaaataccgaacaaaatctaaacgccctataaatttacaccttc

SEQ ID NO: 40677 - DNA, 567 bp, Artificial Sequence
  chemically treated genomic DNA (Homo sapiens) CpG-island No: 40677
tcgtcgtcgtgagcggagtagtattttttttcgcgggtcgcgggagttatttacgggaagggatttttcgtttggtataggttttgtttggtttggggcgcgtatgtttcgtcgtcgaattttttagaaagtcgtggattcgaggtttcggtagacgtaggcggtttagcgttttgtttttggtttttcgtttcgttttggagttttttttcgtaaggtaagggattgtcgggaacgtagatcgtaagtcgtcggggttttgtagaatttagaggcgttcggcggaaagttcgttaggcgatttagattcgaattcgcgggttttttaagataatagcgtcgggcggtcggatgtacgtgcgtttcgggaaggcgggtttagttggtatcgtttggtcggtttcgttcgttttttaaattataagatttttttggggttacgacgttttcggggtatttttgtattcgcgcgttagtattttcggaggggtttggggaaggttacgcgtacggagagcgggaaatttttttaggtttttaggtgggagatttagattttattgagat

SEQ ID NO: 40678 - DNA, 567 bp, Artificial Sequence
  chemically treated genomic DNA (Homo sapiens) CpG-island No: 40678
atctcaataaaatctaaatctcccacctaaaaacctaaaaaaatttcccgctctccgtacgcgtaaccttccccaaacccctccgaaaatactaacgcgcgaatacaaaaataccccgaaaacgtcgtaaccccaaaaaaatcttataatttaaaaaacgaacgaaaccgaccaaacgataccaactaaacccgccttcccgaaacgcacgtacatccgaccgcccgacgctattatcttaaaaaacccgcgaattcgaatctaaatcgcctaacgaactttccgccgaacgcctctaaattctacaaaaccccgacgacttacgatctacgttcccgacaatcccttaccttacgaaaaaaaactccaaaacgaaacgaaaaaccaaaaacaaaacgctaaaccgcctacgtctaccgaaacctcgaatccacgactttctaaaaaattcgacgacgaaacatacgcgccccaaaccaaacaaaacctataccaaacgaaaaatcccttcccgtaaataactcccgcgacccgcgaaaaaaaatactactccgctcacgacgacga

SEQ ID NO: 40679 - DNA, 567 bp, Artificial Sequence
  chemically treated genomic DNA (Homo sapiens) CpG-island No: 40679
gttttagtagggtttggattttttatttggaaatttagaggagtttttcgtttttcgtgcgcgtggttttttttaggttttttcgggagtgttggcgcgcgagtgtaggggtgtttcgggaacgtcgtgattttaagggggttttgtggtttaaggagcgaacggaatcggttaggcgatgttagttgaattcgttttttcgggacgtacgtgtattcggtcgttcggcgttgttgttttggggagttcgcgggttcgggtttgggtcgtttggcgagtttttcgtcgagcgtttttgagttttatagagtttcgacggtttgcgatttgcgttttcggtagttttttattttgcgagagagggttttagggcgaggcgaggggttaaaagtaaggcgttgggtcgtttgcgtttgtcggggtttcgggtttacggttttttggaagattcggcggcggagtatgcgcgttttaggttagatagggtttgtgttagacggagagttttttttcgtaggtgattttcgcgattcgcggaggaaggtgttgtttcgtttacggcggcgg

SEQ ID NO: 40680 - DNA, 567 bp, Artificial Sequence
  chemically treated genomic DNA (Homo sapiens) CpG-island No: 40680
ccgccgccgtaaacgaaacaacaccttcctccgcgaatcgcgaaaatcacctacgaaaaaaaactctccgtctaacacaaaccctatctaacctaaaacgcgcatactccgccgccgaatcttccaaaaaaccgtaaacccgaaaccccgacaaacgcaaacgacccaacgccttacttttaacccctcgcctcgccctaaaaccctctctcgcaaaataaaaaactaccgaaaacgcaaatcgcaaaccgtcgaaactctataaaactcaaaaacgctcgacgaaaaactcgccaaacgacccaaacccgaacccgcgaactccccaaaacaacaacgccgaacgaccgaatacacgtacgtcccgaaaaaacgaattcaactaacatcgcctaaccgattccgttcgctccttaaaccacaaaacccccttaaaatcacgacgttcccgaaacacccctacactcgcgcgccaacactcccgaaaaaacctaaaaaaaaccacgcgcacgaaaaacgaaaaactcctctaaatttccaaataaaaaatccaaaccctactaaaac

SEQ ID NO: 40681 - DNA, 646 bp, Artificial Sequence
  chemically treated genomic DNA (Homo sapiens) CpG-island No: 40681
gcgtgtcgttcgcgtaacgatagcgtttatcgttattttatacggttcgttaaaaagggcgatttgtaaatagttattttttatttataatgtagcgaatttaatgttgggtatcgaaacgtgtatttttttcggatttttatttcgcgtttttgttttacgttttaggattcgtcgttagtggggtttatttcgtcggcgcgggggttggggtgggagttcggggttacgtgtacggttagtttttattttttgggcggttaagatcgtaggcgtgggcgtcggtggggcgggggttttgggagattttgtttcgtcgtttttcggtgtagatgatgtaattttgggcggaggcgcggagagggaaatcgggatttagttgagattttttgtttagagaggggagcgagtttcggtggggtcggattttatttggacggatatatggaaaagaggggcgagcggttgtttcgattgcggcgaggcggagacggcgatttcggggtggcggtttcgcggggatttacggcgaggggagtaggcgggcggtgattggcggagaggcgggggcggaggtcggcgtcggttaatgtttcgtggtagagtattcgtttttttagttttttttttattttatttagttcgg

SEQ ID NO: 40682 - DNA, 646 bp, Artificial Sequence
  chemically treated genomic DNA (Homo sapiens) CpG-island No: 40682
ccgaactaaataaaataaaaaaaaaactaaaaaaacgaatactctaccacgaaacattaaccgacgccgacctccgcccccgcctctccgccaatcaccgcccgcctactcccctcgccgtaaatccccgcgaaaccgccaccccgaaatcgccgtctccgcctcgccgcaatcgaaacaaccgctcgcccctcttttccatatatccgtccaaataaaatccgaccccaccgaaactcgctcccctctctaaacaaaaaatctcaactaaatcccgatttccctctccgcgcctccgcccaaaattacatcatctacaccgaaaaacgacgaaacaaaatctcccaaaacccccgccccaccgacgcccacgcctacgatcttaaccgcccaaaaaataaaaactaaccgtacacgtaaccccgaactcccaccccaacccccgcgccgacgaaataaaccccactaacgacgaatcctaaaacgtaaaacaaaaacgcgaaataaaaatccgaaaaaaatacacgtttcgatacccaacattaaattcgctacattataaataaaaaataactatttacaaatcgccctttttaacgaaccgtataaaataacgataaacgctatcgttacgcgaacgacacgc

SEQ ID NO: 40683 - DNA, 646 bp, Artificial Sequence
  chemically treated genomic DNA (Homo sapiens) CpG-island No: 40683
tcgggttgggtggggtggaggaggggttgggggggcgggtgttttgttacgagatattggtcggcgtcggttttcgttttcgttttttcgttaattatcgttcgtttgtttttttcgtcgtgggttttcgcgaggtcgttatttcggggtcgtcgttttcgtttcgtcgtagtcggggtagtcgttcgttttttttttttatgtattcgtttaggtgagattcggttttatcgagattcgtttttttttttggatagaggattttaattgggtttcggttttttttttcgcgttttcgtttagagttgtattatttgtatcgaaaggcggcgagatagggttttttaagattttcgttttatcggcgtttacgtttgcggttttgatcgtttagaagatgggggttggtcgtgtacgtggtttcgggtttttattttagttttcgcgtcggcggagtggattttattggcggcgagttttggagcgtggagtagggacgcggggtgggaattcgggggagatgtacgtttcggtgtttagtattgagttcgttgtattgtggatgggaaatggttgtttgtaaatcgttttttttggcggatcgtgtggggtggcggtaaacgttgtcgttgcgcgggcggtacgt

SEQ ID NO: 40684 - DNA, 646 bp, Artificial Sequence
  chemically treated genomic DNA (Homo sapiens) CpG-island No: 40684
acgtaccgcccgcgcaacgacaacgtttaccgccaccccacacgatccgccaaaaaaaacgatttacaaacaaccatttcccatccacaatacaacgaactcaatactaaacaccgaaacgtacatctcccccgaattcccaccccgcgtccctactccacgctccaaaactcgccgccaataaaatccactccgccgacgcgaaaactaaaataaaaacccgaaaccacgtacacgaccaacccccatcttctaaacgatcaaaaccgcaaacgtaaacgccgataaaacgaaaatcttaaaaaaccctatctcgccgcctttcgatacaaataatacaactctaaacgaaaacgcgaaaaaaaaaaccgaaacccaattaaaatcctctatccaaaaaaaaaaacgaatctcgataaaaccgaatctcacctaaacgaatacataaaaaaaaaaaacgaacgactaccccgactacgacgaaacgaaaacgacgaccccgaaataacgacctcgcgaaaacccacgacgaaaaaaacaaacgaacgataattaacgaaaaaacgaaaacgaaaaccgacgccgaccaatatctcgtaacaaaacacccgcccccccaacccctcctccaccccacccaacccga

SEQ ID NO: 40685 - DNA, 812 bp, Artificial Sequence
  chemically treated genomic DNA (Homo sapiens) CpG-island No: 40685
gaataaacgtgtttacgtttaaaaggttcggatgttttaggtaatttttagcgcggttcgaggcggttttcgggagtcggcgattcggaggttcggacgtcgggcgattagttagttcggattttaaggtcggagaaagttcggtcgcggcgtttcgaaaagagattttatttattttgttcgttttagtttttcgtcgcgcggtttacgaggcggcggtttcggagggcgcgtaaggggtcggaagggttatcgttttttttcgtcgcgcgtttttttttcgttatcgtcgcgtcggttcgtttgggttttttcggtcgtttttttatcgttttaattattttgcgtttcgatcgcgtttaattttcggcggggggtttttatttatttgtttttttcggtgtcgaagatggaggttagatatttcgttattttttattcgtcgtcgtcgttgtcgtcgatattgttgtcgacgtcgtcgattttgtcgacgttttcgggagacgttattcggacgcgacgacgttttttttcgtttcgacgtggtagcgttatttagttaggcgaggtgttgtttgcgcgtgggcgggacgtatgcgcgtagggagtacgtagtgcgcgtgggaggtttcgttttttcggttttgggaattcgcgttttttgtcggtgtttttttcgttcggttttagttttttcgttttttcgttcgttcggcgttggttttgttggattttgcgcgtcggggattgggggttggtagtgtagatcgaattcggggtcgaggggtttttttatagagtcgtttggggtt

SEQ ID NO: 40686 - DNA, 812 bp, Artificial Sequence
  chemically treated genomic DNA (Homo sapiens) CpG-island No: 40686
aaccccaaacgactctataaaaaaacccctcgaccccgaattcgatctacactaccaacccccaatccccgacgcgcaaaatccaacaaaaccaacgccgaacgaacgaaaaaacgaaaaaactaaaaccgaacgaaaaaaacaccgacaaaaaacgcgaattcccaaaaccgaaaaaacgaaacctcccacgcgcactacgtactccctacgcgcatacgtcccgcccacgcgcaaacaacacctcgcctaactaaataacgctaccacgtcgaaacgaaaaaaaacgtcgtcgcgtccgaataacgtctcccgaaaacgtcgacaaaatcgacgacgtcgacaacaatatcgacgacaacgacgacgacgaataaaaaataacgaaatatctaacctccatcttcgacaccgaaaaaaacaaataaataaaaaccccccgccgaaaattaaacgcgatcgaaacgcaaaataattaaaacgataaaaaaacgaccgaaaaaacccaaacgaaccgacgcgacgataacgaaaaaaaaacgcgcgacgaaaaaaaacgataacccttccgaccccttacgcgccctccgaaaccgccgcctcgtaaaccgcgcgacgaaaaactaaaacgaacaaaataaataaaatctcttttcgaaacgccgcgaccgaactttctccgaccttaaaatccgaactaactaatcgcccgacgtccgaacctccgaatcgccgactcccgaaaaccgcctcgaaccgcgctaaaaattacctaaaacatccgaaccttttaaacgtaaacacgtttattc

SEQ ID NO: 40687 - DNA, 812 bp, Artificial Sequence
  chemically treated genomic DNA (Homo sapiens) CpG-island No: 40687
agttttaggcggttttgtggagaagtttttcggtttcgggttcggtttgtattgttagtttttagttttcggcgcgtaggatttagtagggttagcgtcgggcgggcgagaaggcgagagagttagggtcgggcggggagggtatcggtagggggcgcgggtttttaggatcgaaaaggcggagttttttacgcgtattacgtgttttttacgcgtatgcgtttcgtttacgcgtaggtagtatttcgtttgattgggtagcgttgttacgtcggggcggggaagagcgtcgtcgcgttcgggtgacgtttttcgagggcgtcggtagggtcggcggcgtcggtagtagtgtcgacggtagcggcggcggcgggtgggaaatggcggagtatttggtttttattttcggtatcgagaaagataagtgagtgggagtttttcgtcgggggttgggcgcgatcggggcgtagggtggttgaggcggtgggagggcgatcggggaggtttaggcgggtcggcgcggcggtggcgggggaggggcgcgcggcgggaaggagcggtggttttttcggttttttgcgcgtttttcggagtcgtcgtttcgtgggtcgcgcggcggaaaattggagcgggtagaatgaatggggttttttttcggggcgtcgcggtcgagtttttttcggttttggggttcggattggttgatcgttcgacgttcgggttttcgagtcgtcgattttcggaagtcgtttcgagtcgcgttgaaagttgtttggagtattcgggttttttggacgtggatacgtttgttt

SEQ ID NO: 40688 - DNA, 812 bp, Artificial Sequence
  chemically treated genomic DNA (Homo sapiens) CpG-island No: 40688
aaacaaacgtatccacgtccaaaaaacccgaatactccaaacaactttcaacgcgactcgaaacgacttccgaaaatcgacgactcgaaaacccgaacgtcgaacgatcaaccaatccgaaccccaaaaccgaaaaaaactcgaccgcgacgccccgaaaaaaaaccccattcattctacccgctccaattttccgccgcgcgacccacgaaacgacgactccgaaaaacgcgcaaaaaaccgaaaaaaccaccgctccttcccgccgcgcgcccctcccccgccaccgccgcgccgacccgcctaaacctccccgatcgccctcccaccgcctcaaccaccctacgccccgatcgcgcccaacccccgacgaaaaactcccactcacttatctttctcgataccgaaaataaaaaccaaatactccgccatttcccacccgccgccgccgctaccgtcgacactactaccgacgccgccgaccctaccgacgccctcgaaaaacgtcacccgaacgcgacgacgctcttccccgccccgacgtaacaacgctacccaatcaaacgaaatactacctacgcgtaaacgaaacgcatacgcgtaaaaaacacgtaatacgcgtaaaaaactccgccttttcgatcctaaaaacccgcgccccctaccgataccctccccgcccgaccctaactctctcgccttctcgcccgcccgacgctaaccctactaaatcctacgcgccgaaaactaaaaactaacaatacaaaccgaacccgaaaccgaaaaacttctccacaaaaccgcctaaaact

SEQ ID NO: 40689 - DNA, 531 bp, Artificial Sequence
  chemically treated genomic DNA (Homo sapiens) CpG-island No: 40689
atataatcgtttcgtcgattggtttttttatacgttttttacggattcgagtaattatcgagttagaggcgatatacgttttcgtcgataagggtcgtgttttttacgaagatgtttagtttattggttatggcgacgttcggggtcgtagcgtttcgagtaggagcgagtattgttcgggattggcgcgtcgtttttaggttattttcgggagcgtcgagatttcgttcgcggtatcgggatttagtttatgattattttcgggatatagttagtcggggaggggacggggcgggagcggcgagggaagagagggggaggtttgcgcggaggagtatcgttttttttcgtcgggagggggagtttcgggtttttgcgttttgttttttttttcggtcgtttgtaggagtacgaagggagtgtttttttttcgttttttcggttttcgtaatttttttttttatttttttttggttttttttttattttttttgtttttttcgggattttttaagtttgatttgtatttta

SEQ ID NO: 40690 - DNA, 531 bp, Artificial Sequence
  chemically treated genomic DNA (Homo sapiens) CpG-island No: 40690
taaaatacaaatcaaacttaaaaaatcccgaaaaaaacaaaaaaaataaaaaaaaaaccaaaaaaaaataaaaaaaaaaattacgaaaaccgaaaaaacgaaaaaaaaacactcccttcgtactcctacaaacgaccgaaaaaaaaaacaaaacgcaaaaacccgaaactccccctcccgacgaaaaaaaacgatactcctccgcgcaaacctccccctctcttccctcgccgctcccgccccgtcccctccccgactaactatatcccgaaaataatcataaactaaatcccgataccgcgaacgaaatctcgacgctcccgaaaataacctaaaaacgacgcgccaatcccgaacaatactcgctcctactcgaaacgctacgaccccgaacgtcgccataaccaataaactaaacatcttcgtaaaaaacacgacccttatcgacgaaaacgtatatcgcctctaactcgataattactcgaatccgtaaaaaacgtataaaaaaaccaatcgacgaaacgattatat

SEQ ID NO: 40691 - DNA, 531 bp, Artificial Sequence
  chemically treated genomic DNA (Homo sapiens) CpG-island No: 40691
taggatataggttaaatttaggaggtttcgaagagggtagagaaggtgggagaaaagttaggaggaagtgaggggagaagttacggggatcgaggagacgaagaggaggtatttttttcgtgtttttgtagacggtcggggagggagataggacgtaggagttcgggattttttttttcggcgggaggaagcggtgttttttcgcgtaggttttttttttttttttttcgtcgttttcgtttcgtttttttttcgattggttgtgtttcggaagtggttataagttgggtttcgatgtcgcgagcggaatttcggcgttttcggaagtggtttgaaggcggcgcgttagtttcgagtagtgttcgtttttgttcggggcgttgcggtttcgggcgtcgttatgattagtgagttggatattttcgtggggaatacgatttttatcgacgaggacgtgtatcgtttttggttcgatggttattcgggttcgtgaggggcgtgtggggaagttagtcggcggagcggttgtgt

SEQ ID NO: 40692 - DNA, 531 bp, Artificial Sequence
  chemically treated genomic DNA (Homo sapiens) CpG-island No: 40692
acacaaccgctccgccgactaacttccccacacgcccctcacgaacccgaataaccatcgaaccaaaaacgatacacgtcctcgtcgataaaaatcgtattccccacgaaaatatccaactcactaatcataacgacgcccgaaaccgcaacgccccgaacaaaaacgaacactactcgaaactaacgcgccgccttcaaaccacttccgaaaacgccgaaattccgctcgcgacatcgaaacccaacttataaccacttccgaaacacaaccaatcgaaaaaaaaacgaaacgaaaacgacgaaaaaaaaaaaaaaaaaacctacgcgaaaaaacaccgcttcctcccgccgaaaaaaaaaatcccgaactcctacgtcctatctccctccccgaccgtctacaaaaacacgaaaaaaatacctcctcttcgtctcctcgatccccgtaacttctcccctcacttcctcctaacttttctcccaccttctctaccctcttcgaaacctcctaaatttaacctatatccta

SEQ ID NO: 40693 - DNA, 664 bp, Artificial Sequence
  chemically treated genomic DNA (Homo sapiens) CpG-island No: 40693
  unsure (420)
gttgcgttgttttcgcgtttttattattgtattcggaaggttaaagtagtattaatcgcggcggtggttgtagcgtagatttcgatttttttcgttttttttcgcggttacggtttttttttttcgttagttacgtagttatttattttcgttttcggtttaaattttgcgtgattgtttagcgtttatttttggaggaagaagtaacgttaagtagtcgtagagtacggtatgtttatgcgtatttagtattacgcggttttcgcgtttaaaatattgttttaaaatattcggttcgtcggagtaaacgcgtttgcgttatgtttattaatggttagcgatttagcgtttgcggttcgtttttcggttcgggtttcggggtttttatttatttttttcgttttcgtcgtttttttcgtnttttttattttcgtttttttaagtttgaggacggaagtgacgatagtttcgaaggcgaacggaggcgggttttatttcggcgtttttttttttttggcggaagcgattggttgtcgtgaagcgaaagaggcgggataaattgtcgcgagtttagtgtcgttattggaattaggagatgcggcgtaggagttgtcgttgtgtttgttttaatttgagttttgttttttattgtggtttttgttgt

SEQ ID NO: 40694 - DNA, 664 bp, Artificial Sequence
  chemically treated genomic DNA (Homo sapiens) CpG-island No: 40694
  unsure (245)
acaacaaaaaccacaataaaaaacaaaactcaaattaaaacaaacacaacgacaactcctacgccgcatctcctaattccaataacgacactaaactcgcgacaatttatcccgcctctttcgcttcacgacaaccaatcgcttccgccaaaaaaaaaaaaacgccgaaataaaacccgcctccgttcgccttcgaaactatcgtcacttccgtcctcaaacttaaaaaaacgaaaataaaaaanacgaaaaaaacgacgaaaacgaaaaaaataaataaaaaccccgaaacccgaaccgaaaaacgaaccgcaaacgctaaatcgctaaccattaataaacataacgcaaacgcgtttactccgacgaaccgaatattttaaaacaatattttaaacgcgaaaaccgcgtaatactaaatacgcataaacataccgtactctacgactacttaacgttacttcttcctccaaaaataaacgctaaacaatcacgcaaaatttaaaccgaaaacgaaaataaataactacgtaactaacgaaaaaaaaaaaccgtaaccgcgaaaaaaaacgaaaaaaatcgaaatctacgctacaaccaccgccgcgattaatactactttaaccttccgaatacaataataaaaacgcgaaaacaacgcaac

SEQ ID NO: 40695 - DNA, 664 bp, Artificial Sequence
  chemically treated genomic DNA (Homo sapiens) CpG-island No: 40695
  unsure (245)
atagtaggaattataataaggaataagatttaggttaaagtaaatatagcgatagtttttgcgtcgtattttttggttttagtggcggtattgaattcgcggtaatttgtttcgtttttttcgttttacggtagttaatcgttttcgttagagaaagaaaggcgtcgaaatgaaattcgttttcgttcgttttcggaattgtcgttattttcgtttttagatttggaggggcggggatgaggagngcggggaggacgacgagggcgaagagggtgggtgagagtttcggagttcgagtcgaagggcgagtcgtaaacgttaagtcgttggttattggtggatatggcgtaggcgcgtttgtttcgacgggtcgaatgttttggggtagtgttttgagcgcggagatcgcgtgatattggatgcgtatgggtatatcgtgttttgcggttgtttggcgttgtttttttttttagaagtgggcgttgggtagttacgtagggtttgaatcggaagcgggagtaggtagttgcgtggttaacggagaaaagaagtcgtggtcgcgggaggaggcgagaggagtcgggatttgcgttgtagttatcgtcgcggttgatattattttgatttttcgagtgtagtggtaggggcgcggaggtaacgtagt

SEQ ID NO: 40696 - DNA, 664 bp, Artificial Sequence
  chemically treated genomic DNA (Homo sapiens) CpG-island No: 40696
  unsure (420)
actacgttacctccgcgcccctaccactacactcgaaaaatcaaaataatatcaaccgcgacgataactacaacgcaaatcccgactcctctcgcctcctcccgcgaccacgacttcttttctccgttaaccacgcaactacctactcccgcttccgattcaaaccctacgtaactacccaacgcccacttctaaaaaaaaaaacaacgccaaacaaccgcaaaacacgatatacccatacgcatccaatatcacgcgatctccgcgctcaaaacactaccccaaaacattcgacccgtcgaaacaaacgcgcctacgccatatccaccaataaccaacgacttaacgtttacgactcgcccttcgactcgaactccgaaactctcacccaccctcttcgccctcgtcgtcctccccgcnctcctcatccccgcccctccaaatctaaaaacgaaaataacgacaattccgaaaacgaacgaaaacgaatttcatttcgacgcctttctttctctaacgaaaacgattaactaccgtaaaacgaaaaaaacgaaacaaattaccgcgaattcaataccgccactaaaaccaaaaaatacgacgcaaaaactatcgctatatttactttaacctaaatcttattccttattataattcctactat

SEQ ID NO: 40697 - DNA, 580 bp, Artificial Sequence
  chemically treated genomic DNA (Homo sapiens) CpG-island No: 40697
gcgtaaaagcgtttttattttttcgttttgcgcggttaggtaggcggttggagttgatggtttatttcgcgttttttgttttatttttattcgagatagggaacgaggagtacgttgtagggaaagtagcgagcgtcgggagaggggcggggagaagcgttgataaattagcggtgggggcggagagtcgaggagaaggagaaggaggaggattaggaggaggaggacggcgacgattagaaggggtttaagagagggggcgagcgatcgagcgtcgcgacgcggaagtgaggtgcgtgcgggttgtagcgtagatttcggttcggttttttcgagagcgttttgggcgtttttttacgttttgtttttaagttttttgtttttttattttcgtgagcggagaattgggagtggttattcgacgataggttagcgggtttgttttttatttttttagtttcgcgtcgtcggtttatagcggttttttttggggatagtttttttcgggtgtcgttttcgttttttttgtgcgttttttttttttttttttttttattaaatattatttgggaattgttta

SEQ ID NO: 40698 - DNA, 580 bp, Artificial Sequence
  chemically treated genomic DNA (Homo sapiens) CpG-island No: 40698
taaacaattcccaaataatatttaataaaaaaaaaaaaaaaaaaaaaacgcacaaaaaaaacgaaaacgacacccgaaaaaaactatccccaaaaaaaaccgctataaaccgacgacgcgaaactaaaaaaataaaaaacaaacccgctaacctatcgtcgaataaccactcccaattctccgctcacgaaaataaaaaaacaaaaaacttaaaaacaaaacgtaaaaaaacgcccaaaacgctctcgaaaaaaccgaaccgaaatctacgctacaacccgcacgcacctcacttccgcgtcgcgacgctcgatcgctcgccccctctcttaaaccccttctaatcgtcgccgtcctcctcctcctaatcctcctccttctccttctcctcgactctccgcccccaccgctaatttatcaacgcttctccccgcccctctcccgacgctcgctactttccctacaacgtactcctcgttccctatctcgaataaaaataaaacaaaaaacgcgaaataaaccatcaactccaaccgcctacctaaccgcgcaaaacgaaaaaataaaaacgcttttacgc

SEQ ID NO: 40699 - DNA, 580 bp, Artificial Sequence
  chemically treated genomic DNA (Homo sapiens) CpG-island No: 40699
taaataatttttaaataatatttaataggaaagaagaaggaaaaggagcgtataggaagggcggaggcggtattcgggggggattgtttttagaggaggtcgttgtgagtcggcgacgcgaggttgggggagtgggaggtaaattcgttaatttgtcgtcgaatggttatttttagtttttcgtttacgagggtggaaaggtagaaggtttgaaggtaaggcgtgagggagcgtttaggacgttttcggaggggtcgggtcggggtttgcgttgtagttcgtacgtattttattttcgcgtcgcggcgttcggtcgttcgtttttttttttgggttttttttggtcgtcgtcgtttttttttttttagttttttttttttttttttttttcggtttttcgtttttatcgttgatttgttagcgttttttttcgtttttttttcggcgttcgttgttttttttgtagcgtgtttttcgttttttatttcggatggggatggggtagggggcgcggggtgagttattaattttagtcgtttgtttggtcgcgtaaggcgggaaagtgggggcgtttttgcgt

SEQ ID NO: 40700 - DNA, 580 bp, Artificial Sequence
  chemically treated genomic DNA (Homo sapiens) CpG-island No: 40700
acgcaaaaacgcccccactttcccgccttacgcgaccaaacaaacgactaaaattaataactcaccccgcgccccctaccccatccccatccgaaataaaaaacgaaaaacacgctacaaaaaaaacaacgaacgccgaaaaaaaaacgaaaaaaaacgctaacaaatcaacgataaaaacgaaaaaccgaaaaaaaaaaaaaaaaaaaaaactaaaaaaaaaaaaacgacgacgaccaaaaaaaacccaaaaaaaaaaacgaacgaccgaacgccgcgacgcgaaaataaaatacgtacgaactacaacgcaaaccccgacccgacccctccgaaaacgtcctaaacgctccctcacgccttaccttcaaaccttctacctttccaccctcgtaaacgaaaaactaaaaataaccattcgacgacaaattaacgaatttacctcccactcccccaacctcgcgtcgccgactcacaacgacctcctctaaaaacaatcccccccgaataccgcctccgcccttcctatacgctccttttccttcttctttcctattaaatattatttaaaaattattta

SEQ ID NO: 40701 - DNA, 662 bp, Artificial Sequence
  chemically treated genomic DNA (Homo sapiens) CpG-island No: 40701
aacgggggcgtttttttataggcggttaagatcgcgcgtattattatttttattttttttagtagcgtcgtcgtcgtcgcggtcgtcgcgcgtatcggtatgtttttttggaattgcgataacgcggttatcgtcgtcgtcgttatcgttatgttttggggtagcggcgggggcgggggcggcggcgggcgggggtggcggcggcggcggcggcggcggatgcgggggcggtggttatgcgggcgatagtagatgtttttacggcgtcgcgtttttttttcgattgtttttattgagtaatgttgcgcgtaggaattggcggcggttttagagggggtcgtataggagttagtttgacgagtcgtagggttcgtagaggggggggagacgtgttcggttttataggggtgttcgttgttcgggcgtgcgattgtcgtgtagaggtgggcgcgcggggttggttgttttgggggcgtcgtcgcggtcgggaggtcgagtgggcgagggtacgcgtttttagtgttgattttttcgaggtatttcgggacgtttttttggagggaattttggggggtcgcgtagtgtgtggggtgtttcgtggtagcgggagggtttttcgtttcgtcggtggatcggggggtcgggcgttttaatttttttgt

SEQ ID NO: 40702 - DNA, 662 bp, Artificial Sequence
  chemically treated genomic DNA (Homo sapiens) CpG-island No: 40702
acaaaaaaattaaaacgcccgaccccccgatccaccgacgaaacgaaaaaccctcccgctaccacgaaacaccccacacactacgcgaccccccaaaattccctccaaaaaaacgtcccgaaatacctcgaaaaaatcaacactaaaaacgcgtaccctcgcccactcgacctcccgaccgcgacgacgcccccaaaacaaccaaccccgcgcgcccacctctacacgacaatcgcacgcccgaacaacgaacacccctataaaaccgaacacgtctcccccccctctacgaaccctacgactcgtcaaactaactcctatacgaccccctctaaaaccgccgccaattcctacgcgcaacattactcaataaaaacaatcgaaaaaaaaacgcgacgccgtaaaaacatctactatcgcccgcataaccaccgcccccgcatccgccgccgccgccgccgccgccacccccgcccgccgccgcccccgcccccgccgctaccccaaaacataacgataacgacgacgacgataaccgcgttatcgcaattccaaaaaaacataccgatacgcgcgacgaccgcgacgacgacgacgctactaaaaaaaataaaaataataatacgcgcgatcttaaccgcctataaaaaaacgcccccgtt

SEQ ID NO: 40703 - DNA, 662 bp, Artificial Sequence
  chemically treated genomic DNA (Homo sapiens) CpG-island No: 40703
gtagaggaattagggcgttcgatttttcggtttatcggcgaggcggaaggttttttcgttattacggggtattttatatattacgcgattttttagaattttttttagggaaacgtttcgaaatgtttcgggggaattagtattaggggcgcgtgttttcgtttattcggtttttcgatcgcggcggcgtttttaaggtagttagtttcgcgcgtttatttttatacgatagtcgtacgttcgaataacgagtatttttgtggggtcgaatacgttttttttttttttgcgagttttgcggttcgttaagttagtttttgtgcggttttttttgaagtcgtcgttagtttttgcgcgtagtattgtttagtaggagtagtcggaggaggagcgcggcgtcgtaggagtatttgttgtcgttcgtatgattatcgttttcgtattcgtcgtcgtcgtcgtcgtcgttattttcgttcgtcgtcgttttcgttttcgtcgttgttttagagtatggcggtggcggcggcggcggtggtcgcgttgtcgtagttttagggggatatgtcgatgcgcgcggcggtcgcggcggcggcggcgttgttggggaagatgggggtggtgatgcgcgcgattttggtcgtttgtgggaaggcgttttcgtt

SEQ ID NO: 40704 - DNA, 662 bp, Artificial Sequence
  chemically treated genomic DNA (Homo sapiens) CpG-island No: 40704
aacgaaaacgccttcccacaaacgaccaaaatcgcgcgcatcaccacccccatcttccccaacaacgccgccgccgccgcgaccgccgcgcgcatcgacatatccccctaaaactacgacaacgcgaccaccgccgccgccgccaccgccatactctaaaacaacgacgaaaacgaaaacgacgacgaacgaaaataacgacgacgacgacgacgacgaatacgaaaacgataatcatacgaacgacaacaaatactcctacgacgccgcgctcctcctccgactactcctactaaacaatactacgcgcaaaaactaacgacgacttcaaaaaaaaccgcacaaaaactaacttaacgaaccgcaaaactcgcaaaaaaaaaaaaaacgtattcgaccccacaaaaatactcgttattcgaacgtacgactatcgtataaaaataaacgcgcgaaactaactaccttaaaaacgccgccgcgatcgaaaaaccgaataaacgaaaacacgcgcccctaatactaattcccccgaaacatttcgaaacgtttccctaaaaaaaattctaaaaaatcgcgtaatatataaaataccccgtaataacgaaaaaaccttccgcctcgccgataaaccgaaaaatcgaacgccctaattcctctac

SEQ ID NO: 40705 - DNA, 556 bp, Artificial Sequence
  chemically treated genomic DNA (Homo sapiens) CpG-island No: 40705
agttcgagcgtcggggcgggagggatgatttcggacggtagggggtatcggcgtgcggttcggtcgagtttttaggtagtttcgcgcgtatagtaggatcgttattgacgttatgagcgcgttgttgcggttgttgcgtacgggtgttttagtcgttgcgtgtttgcggttggggattagtgtagggatcgggtcgcgtcgtgttatggttttgtattatattgaggagcgcggttagttttgttcgtagaattatcgttttttttttagtaagtagttttcggaggttcgtcgagcggcgtatcggagaaatttgggtgggggatggaatgggggatatttgggacgtttcgcgcggttttttttttttttttttggggtttttagcggtagtcgcgcggtttaggttattttatttttcgcgggagcgcgtatcgagttacgagaattgttagcgaggaggcggcggattaagattttaaagcggagagtagaggcgtagggttgtcggttggggggtagatagcgttttgtgttttgttagtcgtttttttcg

SEQ ID NO: 40706 - DNA, 556 bp, Artificial Sequence
  chemically treated genomic DNA (Homo sapiens) CpG-island No: 40706
cgaaaaaaacgactaacaaaacacaaaacgctatctaccccccaaccgacaaccctacgcctctactctccgctttaaaatcttaatccgccgcctcctcgctaacaattctcgtaactcgatacgcgctcccgcgaaaaataaaataacctaaaccgcgcgactaccgctaaaaaccccaaaaaaaaaaaaaaaaaaccgcgcgaaacgtcccaaatatcccccattccatcccccacccaaatttctccgatacgccgctcgacgaacctccgaaaactacttactaaaaaaaaaacgataattctacgaacaaaactaaccgcgctcctcaatataatacaaaaccataacacgacgcgacccgatccctacactaatccccaaccgcaaacacgcaacgactaaaacacccgtacgcaacaaccgcaacaacgcgctcataacgtcaataacgatcctactatacgcgcgaaactacctaaaaactcgaccgaaccgcacgccgataccccctaccgtccgaaatcatccctcccgccccgacgctcgaact

SEQ ID NO: 40707 - DNA, 556 bp, Artificial Sequence
  chemically treated genomic DNA (Homo sapiens) CpG-island No: 40707
cggggagggcggttggtagggtatagggcgttatttattttttagtcggtagttttgcgtttttgtttttcgttttggggttttgattcgtcgttttttcgttggtagttttcgtgattcggtgcgcgttttcgcgggaagtaaggtggtttggatcgcgcggttatcgttgagggttttaaaaagagagaagggagatcgcgcggggcgttttaagtgttttttattttattttttatttaggttttttcggtgcgtcgttcggcgaattttcgggagttatttattaaagaagaggcggtaattttgcgagtagggttggtcgcgttttttagtgtggtatagggttatagtacggcgcgattcggtttttgtattggtttttaatcgtaggtacgtagcggttggggtattcgtgcgtagtagtcgtagtagcgcgtttatggcgttaatgacggttttgttgtgcgcgcggagttatttgggggttcggtcgggtcgtacgtcggtgttttttatcgttcggagttatttttttcgtttcggcgttcgggtt

SEQ ID NO: 40708 - DNA, 556 bp, Artificial Sequence
  chemically treated genomic DNA (Homo sapiens) CpG-island No: 40708
aacccgaacgccgaaacgaaaaaaataactccgaacgataaaaaacaccgacgtacgacccgaccgaacccccaaataactccgcgcgcacaacaaaaccgtcattaacgccataaacgcgctactacgactactacgcacgaataccccaaccgctacgtacctacgattaaaaaccaatacaaaaaccgaatcgcgccgtactataaccctataccacactaaaaaacgcgaccaaccctactcgcaaaattaccgcctcttctttaataaataactcccgaaaattcgccgaacgacgcaccgaaaaaacctaaataaaaaataaaataaaaaacacttaaaacgccccgcgcgatctcccttctctctttttaaaaccctcaacgataaccgcgcgatccaaaccaccttacttcccgcgaaaacgcgcaccgaatcacgaaaactaccaacgaaaaaacgacgaatcaaaaccccaaaacgaaaaacaaaaacgcaaaactaccgactaaaaaataaataacgccctataccctaccaaccgccctccccg

SEQ ID NO: 40709 - DNA, 540 bp, Artificial Sequence
  chemically treated genomic DNA (Homo sapiens) CpG-island No: 40709
  unsure (535)
gatgggcgtgtcgggcgtgtttttttatttcggttcgttgtagttgttgttttgggtttttatcgtttcgcgttaggattacggtttcggtggtttgtaaaattcgcggatcgtttgtgcgcggcgtcgtttttatttttagtatggttagttcgtttttcgttattacgttttagattttcgtatcgttatcgtttttattaatgcgttgtatattttcgtgattagagagatcgattcgttttttattattttcgtttataataatatcggttatgattttttgattcgtcgaacggttatttagttttacgcgttttacgtttgcggattcgtttttacggtaaatttattggtgttcgttaacgtaggtgtgcggttttaattttagcgcgaggtatacgtttttttgcgtgagatattttttcgtcgttagtcgcgaaattatcgttatgttatatacgttattaagtagatattttacgcgaatattcgcgttacgtatgtgcgtatcgtaaaaaagaatgttattaanttagg

SEQ ID NO: 40710 - DNA, 540 bp, Artificial Sequence
  chemically treated genomic DNA (Homo sapiens) CpG-island No: 40710
  unsure (6)
cctaanttaataacattcttttttacgatacgcacatacgtaacgcgaatattcgcgtaaaatatctacttaataacgtatataacataacgataatttcgcgactaacgacgaaaaaatatctcacgcaaaaaaacgtatacctcgcgctaaaattaaaaccgcacacctacgttaacgaacaccaataaatttaccgtaaaaacgaatccgcaaacgtaaaacgcgtaaaactaaataaccgttcgacgaatcaaaaaatcataaccgatattattataaacgaaaataataaaaaacgaatcgatctctctaatcacgaaaatatacaacgcattaataaaaacgataacgatacgaaaatctaaaacgtaataacgaaaaacgaactaaccatactaaaaataaaaacgacgccgcgcacaaacgatccgcgaattttacaaaccaccgaaaccgtaatcctaacgcgaaacgataaaaacccaaaacaacaactacaacgaaccgaaataaaaaaacacgcccgacacgcccatc

SEQ ID NO: 40711 - DNA, 540 bp, Artificial Sequence
  chemically treated genomic DNA (Homo sapiens) CpG-island No: 40711
  unsure (6)
tttagnttgatggtatttttttttacgatgcgtatatgcgtggcgcggatattcgcgtggagtgtttgtttaatggcgtgtatgatatggcggtggtttcgcgattagcggcggaaaggtattttacgtaaaaaggcgtatgtttcgcgttggagttggggtcgtatatttacgttggcgagtattagtggatttgtcgtaaaggcgagttcgtaaacgtgaagcgcgtggggttggataatcgttcggcggattagaaaattatgatcgatgttgttgtgggcgggagtgatggggaacgagtcgatttttttgattacgagagtgtataacgtattggtaaaggcgatggcgatgcggagatttggaacgtggtggcggaaaacgaattgattatgttgggagtagaggcgacgtcgcgtatagacgattcgcgagttttataggttatcgaagtcgtggttttgacgcgaggcgatgaggatttaaggtaataattgtagcgagtcggggtagagaaatacgttcggtacgtttatt

SEQ ID NO: 40712 - DNA, 540 bp, Artificial Sequence
  chemically treated genomic DNA (Homo sapiens) CpG-island No: 40712
  unsure (535)
aataaacgtaccgaacgtatttctctaccccgactcgctacaattattaccttaaatcctcatcgcctcgcgtcaaaaccacgacttcgataacctataaaactcgcgaatcgtctatacgcgacgtcgcctctactcccaacataatcaattcgttttccgccaccacgttccaaatctccgcatcgccatcgcctttaccaatacgttatacactctcgtaatcaaaaaaatcgactcgttccccatcactcccgcccacaacaacatcgatcataattttctaatccgccgaacgattatccaaccccacgcgcttcacgtttacgaactcgcctttacgacaaatccactaatactcgccaacgtaaatatacgaccccaactccaacgcgaaacatacgcctttttacgtaaaatacctttccgccgctaatcgcgaaaccaccgccatatcatacacgccattaaacaaacactccacgcgaatatccgcgccacgcatatacgcatcgtaaaaaaaaataccatcaanctaaa
